(19) United States
(12) Patent Application Publication
(10) Pub. No.: US 2018/0291071 A1
(43) Pub. Date: Oct. 11, 2018

(54) NOVEL ANTIGENS AND T CELL EPITOPES FROM COCKROACH AND METHODS OF MAKING AND USING SAME

(71) Applicant: La Jolla Institute for Allergy and Immunology, La Jolla, CA (US)

(72) Inventors: Bjoern PETERS, La Jolla, CA (US); Alessandro SETTE, La Jolla, CA (US)

(73) Assignee: La Jolla Institute for Allergy and Immunology, La Jolla, CA (US)

(21) Appl. No.: 15/574,061

(22) PCT Filed: May 13, 2016
(86) PCT No.: PCT/US2016/032494

§ 371 Date: Nov. 14, 2017

(51) Int. Cl. C07K 14/435; A61K 39/35; A61K 39/00; A61P 37/08; A61K 49/00; G01N 33/50

(52) U.S. Cl. CPC C07K 14/43563; A61K 39/35; A61K 39/001; G01N 2800/24; A61K 49/0004; A61K 49/0006; G01N 33/5041; A61P 37/08

(57) ABSTRACT

The specificity of CD4+ TH responses of German cockroach (Bla g) antigens, and whether differences exist in magnitude or functionality as a function of disease severity, is disclosed. Also disclosed are novel German cockroach allergens and epitopes.

### RELATED APPLICATIONS

[0001] This patent application claims the benefit of U.S. Provisional Patent Application No. 62/161,797 filed on May 14, 2015, entitled NOVEL ANTIGENS AND T CELL EPITOPES FROM COCKROACH AND METHODS OF MAKING AND USING THE SAME, naming Bjoern Peters and Alessandro Sette as inventors, and designated by Attorney Docket No. 051501-0438597. The entire content of the foregoing application is incorporated herein by reference, including all text, tables and drawings.

### GOVERNMENT SUPPORT

[0002] This invention was made with government support under HHSN272200900052C/N01 and U19 AI100275 awarded by the National Institutes of Health. The government has certain rights in the invention.

### FIELD OF THE INVENTION

[0003] The invention relates to Cockroach proteins, peptides, subsequences, portions, homologues, variants and derivatives thereof, and methods and uses and medicaments of such proteins, peptides, including methods of modulating an immune response, protecting a subject against or treating a subject for an allergic response, allergic disorder or allergic disease and inducing immunological tolerance to the allergen in a subject.

### INTRODUCTION

[0004] The German cockroach (Blattella germanica; Bla g) is one of the most common indoor allergens among inner-city children and, as such, is a significant health problem worldwide^{1,2}. In addition, Bla g allergies are strongly correlated to development of asthma, and there is evidence that early exposure to Bla g leads to increased Bla g sensitization and, in turn, increased asthma severity¹.

[0005] The humoral response to Bla g allergens has been subject to intense research. Indeed, the humoral IgE reactivity of sensitized individuals has been utilized to identify Bla g allergens. The allergens Bla g 1, 2, 3, 4, 5, 6, 7, 8, 9, and 11 all have established IgE reactivity from sensitized individuals³⁻¹², and several studies have established correlations of seroreactivity prevalence with the severity of Bla g allergies^{2,13}. However, the cellular arm of the immunological response has been investigated only superficially, limited to few of the known Bla g allergens, and relatively few T cell Bla g antigens and epitopes have been identified^{14,15}.

[0006] A combined transcriptomic and proteomic approach was used to identify novel antigens and epitopes in Timothy grass (TG) allergy¹⁶. This approach greatly expanded the number of TG antigens recognized by T cell responses. Furthermore, it indicated that T cell reactivity is not necessarily limited to pollen recognized by IgE responses, and extends also to pollen proteins recognized by IgG responses, and proteins generally abundant in the pollen extract. Proteomic studies reported several novel Bla g proteins associated with IgE reactivity^{11,17}.

[0007] As mentioned above, while certain T cell epitopes from Bla g^{14,15} have been reported to be characterized, a systematic analysis has not been undertaken, and little information exists regarding the relative immunodominance and breadth of responses. In other systems, such as for example TG pollen^{16,18} and house dust mite¹⁹, responses target a large breadth of epitopes, and each subject typically recognize multiple epitopes. However, it is also commonly noted that a few dominant epitopes account for a large fraction of the response²⁰.

[0008] T cell allergen specific responses are usually dominated by T_{H}2 type responses, with IL-5 secreted at the highest levels, followed by IL-13, IL-4, and IL-9^{21,22}, but involvement of different T helper subsets has also been reported. More recently, T_{H}17 cells have been described, particularly in the context of asthmatic reactions, as IL-17F has been reported in numerous asthmatic states^{23,24}. T_{R}1 secreting IL-10 have been implicated in negative regulation of T cell allergic responses²⁵. T_{H}1 IFNγ producing cells have been described, and a balance in T_{H}1/T_{H}2 polarization has been described as a potential key determinant in regulating allergic reactions²⁶. Finally, recent studies have described T_{FH} cells, associated with production of IL-21, as key regulators of isotype switch (including IgE)²⁷, but little data exist regarding IL-21 production in allergic responses.

[0009] Bla g allergies are associated with a wide range of clinical presentations, ranging from allergic rhinitis (AR) without asthmatic symptoms, to asthma of different severity, ranging from intermittent (IA), to mild, moderate (MMA), and severe (SA)^{2,28}. However, associations of Bla g sensitization with allergies has focused primarily on IgE reactivity to whole Bla g extract or one or two individual allergens, although more recent studies have more thoroughly examined the prevalence of IgE reactivity in populations, if not relative titers²⁹. Accordingly, little data is available to assess whether differential disease severity is reflective or associated with differential magnitude, functionality, or antigen/epitope specificity at the level of T cell responses.

### SUMMARY

[0010] As disclosed herein, the relative balance of different T helper functional subsets and response types in Bla g allergies was determined. T cell responses to the well-described Bla g allergens were characterized, and further a proteomic/transcriptomic approach was used to identify novel Bla g allergens and test whether there were additional Bla g proteins targeted by T cell responses. The balance of T_{H}1, T_{H}2, T_{H}17, T_{R}1, and T_{FH} (IFNγ, IL-5, IL-10, IL-17, and Il-21) epitopic responses to Bla g was determined, and whether distinct patterns of T cell subset responsiveness would be associated with different clinical presentations of Bla g allergy was tested.

[0011] T_{H} responses were characterized in a cohort of adult Bla g sensitized subjects, either with (n=55) or without (n=17) diagnosed asthma, and non-sensitized controls (n=20). Responses were detected for ten known Bla g Allergens and for ten novel T cell responsive Bla g antigens. Responses of sensitized individuals regardless of asthma status were predominantly T_{H}2, and magnitude of responses was higher in patients with diagnosed asthma. Differences were noted in terms of the main allergen recognized. In asthmatic sensitized subjects Bla g 9 and 11 were immunodominant, while in contrast, non-asthmatic sensitized subjects respond preferentially to Bla g 4, and the novel proteomic-identified antigen NBGA5. Bla g 5 was dominantly recognized in both groups.

[0012] The data disclosed herein indicate that within cockroach-sensitized subjects, asthmatic and non-asthmatic individuals are associated with similarly polarized responses. Compared to non-asthmatics, asthmatic individuals are however associated with T_{H} responses of higher magnitude and different allergen specificity.

[0013] In accordance with the invention there are provided novel Cockroach proteins and peptides, as well as methods and uses of and medicaments including such novel Cockroach proteins and peptides. Cockroach proteins and peptides disclosed herein include epitopes and allergens. Also disclosed herein are Cockroach subsequences, portions, homologues, variants and derivatives thereof, and methods and uses of and medicaments including such Cockroach proteins, peptides, subsequences, portions, homologues, variants and derivatives thereof.

[0014] In certain embodiments a Cockroach protein comprises, consists of or consists essentially of an amino acid sequence comprising, consisting of or consisting essentially of an amino acid sequence set forth in Tables 5-8, or a subsequence, portion, homologue, variant or derivative thereof or a subsequence, portion, homologue, variant or derivative thereof, or a combination thereof.

[0015] In particular embodiments of the invention there are provided proteins and peptides including, consisting of or consisting essentially of an amino acid sequence set forth in Table 5 or 6, or a subsequence, portion, homologue, variant or derivative thereof or a subsequence, portion, homologue, variant or derivative thereof, or a combination thereof.

[0016] In other particular embodiments of the invention there are provided proteins and peptides including, consisting of or consisting essentially of an amino acid sequence set forth as (SEQ ID NOs.: 1-23): TIPYYTKKFDEVVKA, ISDFRAAIANYHYDA, YFVAILDYLNHMAKE, VAISRYLGKQFGLSG, MIVDTISDFRAAIAN, DLVANQPNLKALREK, HDDRLGFLTFCPTNL, KNRTTIRGRTKFEGN, DRKMYWQFKMDKIQI, ALREKVLGLPAIKAW, IRGRTKFEGNKFTID, NDIEKRVPFSHDDRL, HMAKEDLVANQPNLK, VLEKLEAGFAKLAAS, NYAIVEGCPAAANGH, GIRIYVDVVLNQMSG, RWRQIFNMVGFRNAV, NIACLLHNKYDSTKS, NGGYLAAGKLTWADF, LNIFTNNLGRINTHV, KTPVLEIDGKQTHQS, PAYFKMNSPSLWKYN, PKSMLLNIFTNNLGR, or a subsequence, portion, homologue, variant or derivative thereof, or a combination thereof.

[0017] In further particular embodiments of the invention there are provided proteins and peptides including, consisting of or consisting essentially of an amino acid sequence set forth as (SEQ ID NOs.: 1-23): TIPYYTKKFDEVVKA, ISDFRAAIANYHYDA, YFVAILDYLNHMAKE, VAISRYLGKQFGLSG, MIVDTISDFRAAIAN, DLVANQPNLKALREK, HDDRLGFLTFCPTNL, KNRTTIRGRTKFEGN, DRKMYWQFKMDKIQI, ALREKVLGLPAIKAW, IRGRTKFEGNKFTID, NDIEKRVPFSHDDRL, HMAKEDLVANQPNLK, VLEKLEAGFAKLAAS, NYAIVEGCPAAANGH, GIRIYVDVVLNQMSG, RWRQIFNMVGFRNAV, NIACLLHNKYDSTKS, NGGYLAAGKLTWADF, LNIFTNNLGRINTHV, KTPVLEIDGKQTHQS, PAYFKMNSPSLWKYN, PKSMLLNIFTNNLGR, or a combination of such amino acid sequences.

[0018] In additional particular embodiments of the invention there are provided proteins and peptides including, consisting of or consisting essentially of a subsequence, portion, homologue, variant or derivative of an amino acid sequence set forth as (SEQ ID NOs.: 1-23): TIPYYTKKFDEVVKA, ISDFRAAIANYHYDA, YFVAILDYLNHMAKE, VAISRYLGKQFGLSG, MIVDTISDFRAAIAN, DLVANQPNLKALREK, HDDRLGFLTFCPTNL, KNRTTIRGRTKFEGN, DRKMYWQFKMDKIQI, ALREKVLGLPAIKAW, IRGRTKFEGNKFTID, NDIEKRVPFSHDDRL, HMAKEDLVANQPNLK, VLEKLEAGFAKLAAS, NYAIVEGCPAAANGH, GIRIYVDVVLNQMSG, RWRQIFNMVGFRNAV, NIACLLHNKYDSTKS, NGGYLAAGKLTWADF, LNIFTNNLGRINTHV, KTPVLEIDGKQTHQS, PAYFKMNSPSLWKYN, PKSMLLNIFTNNLGR, or a combination of such subsequence, portion, homologue, variant or derivative amino acid sequences.

[0019] In still further particular embodiments of the invention, a composition or method excludes, or a protein or peptide is not identical to an amino acid sequence of any of (SEQ ID NOs.: 24-45): FETIVVTVDSLPEFK, LIDDVLAILPLDDLK, FAVATITHAAELQRV, PLYKLVHVFINTQYA, GNQNFLTVFDSTSCN, ISSQYYIQQNGNLC, HFFIGDFFVDHYYSE, GEPIRFLLSYGEKDF, FLLSYGEKDFEDYRF, SMPFGKTPVLEIDGK, VAISRYLGKQFGLSG, ISDFRAAIANYHYDA, YFVAILDYLNHMAKE, HMAKEDLVANQPNLK, DLVANQPNLKALREK, ALREKVLGLPAIKAW, VLGLPAIKAWVAKRP, EQISVLRKAFDAFDR, LRKAFDAFDREKSGS, EFVTLAAKFIIEEDS, EAMEKELREAFRLYD, or SGTVDFDEFMEMMTG.

[0020] In certain embodiments, a Cockroach protein or peptide modulates an anti-allergen immune response. In other certain embodiments, a Cockroach protein or peptide elicits, stimulates, induces, promotes, increases or enhances an anti-allergen immune response. In further certain embodiments, a protein or peptide decreases, reduces, inhibits, suppresses or disrupts an anti-allergen immune response. In particular aspects of the proteins and peptides described herein, an anti-allergen immune response is an anti-Cockroach allergen response.

[0021] In further certain embodiments, a protein or peptide elicits, stimulates, induces, promotes, increases or enhances immunological tolerance (desensitizes) of an allergen, for example, a Cockroach allergen such as a protein or peptide set forth in Tables 5-8; or a subsequence, portion, homologue, variant or derivative thereof or a subsequence, portion, homologue, variant or derivative thereof, or a combination thereof; or an amino acid sequence set forth in Table 5 or 6; or a subsequence, portion, homologue, variant or derivative thereof or a subsequence, portion, homologue, variant or derivative thereof, or a combination thereof; or an amino acid sequence set forth in Table 6, or a subsequence, portion, homologue, variant or derivative thereof or a subsequence, portion, homologue, variant or derivative thereof, or a combination thereof.

[0022] In particular, an anti-allergen immune response is an anti-Cockroach allergen immune response. In particular embodiments, the allergen is a Cockroach enolase, Hsp60, RACK1, TP1, trypsin, vitellogenin, Bla g 1, Bla g 1.0101, Bla g 2, Bla g 4, Bla g 5, Bla g 6, Bla g 6.0101, Bla g 6.0201, Bla g 7, Bla g 9, Bla g 11, or a NBGA (Novel Bla g antigen) protein, such as NBGA1, NBGA2, NBGA3, NBGA4, NBGA5, NBGA6, NBGA7, NBGA8, NBGA9, NBGA10, NBGA11, NBGA12, NBGA13, NBGA14, NBGA15, or NBGA16), e.g. a Cockroach allergen/antigen set forth in Table 5.

[0023] In further particular embodiments, an anti-Cockroach allergen immune response is a T cell response, for example a Th2 immune (cell) response (e.g., memory T cell response). In additional particular embodiments, an anti-Cockroach allergen immune response is an IgG or IgE reactive antigen or allergen.

[0024] In certain aspects, immunological tolerance comprises enhancing or improving tolerance of an anti-Cockroach allergen, such as a T cell response, for example, decreases, reduces, inhibits, suppresses or disrupts a Th2 immune (cell) response (e.g., memory T cell response) against a Cockroach allergen, such as a response against a protein or peptide set forth in any of Tables 5-8, or a subsequence, portion, homologue, variant or derivative thereof. In further aspects, the anti-allergen immune response modulates (e.g., increases, induces, elicits or stimulates, or decreases, reduces, inhibits, suppresses or disrupts) production of a lymphokine or cytokine by a cell. Particular lymphokines and cytokines which may be modulated include, for example, IL-5 (interleukin-5), IL-4 (interleukin-4), IL-10 (interleukin-13), IL-13 (interleukin-13), IL-17 (interleukin-17) and IFN-γ (interferon-gamma).

[0025] Accordingly, in additional embodiments, a Cockroach protein or peptide elicits, stimulates, induces, improves, increases, or enhances immunological tolerance of a subject to an allergen. In further particular embodiments, the Cockroach protein or peptide sequence, subsequence, homologue, or variant desensitizes, or elicits, stimulates, induces, improves, increases, or enhances immunological tolerance of a subject to a Cockroach allergen. Such Cockroach allergens to which immunological tolerance may be elicited, stimulated, induced, improved, increased, or enhanced include but are not limited to a protein or peptide set forth in any of Tables 5-8, and may include or consist of a Cockroach allergen/antigen set forth in Table 5, or a subsequence, portion, homologue, variant or derivative thereof.

[0026] T cell responses can be detected by an assay. For example, lymphokine, cytokine, IL-5 (interleukin-5), IL-4 (interleukin-4), IL-10 (interleukin-13), IL-13 (interleukin-13), IL-17 (interleukin-17) or IFN-γ (interferon-gamma) production can be detected by an immunoassay. IL-5, Il-4, IL-10, IL-13, IL-17 or IFN-γ production can be determined by contacting peripheral blood mononuclear cells (PBMC) with the protein or peptide followed by an immunoassay, for example.

[0027] In various aspects, a homologue or variant has at least 65% homology or identity (or more, e.g., 70%, 75%, 80%, 85%, 90%, 95%, (96%, 97%, 98%, 99% or more) to a Cockroach a protein or peptide set forth in any of Tables 5-8.

[0028] As disclosed herein, in certain embodiments proteins and peptides have a length in a range of about 5-10, 10-15, 15-20, 20-25, 25-30, 30-35, 35-40, 45-50, 50-60, 60-70, 70-80, 80-90, 90-100, 100-125, 125-150, 150-175, 175-200, 200-250, 250-300, or more amino acid residues. In other embodiments, proteins and peptides have a length in a range of up to 25 amino acids in length, or from about 7 to 20; 8 to 30; 8 to 25; 8 to 20; 9 to 30; 9 to 25; 9 to 20; 10 to 30; 10 to 25; 10 to 30 amino acid residues.

[0029] In particular aspects, a (sub)sequence is 7 to 30 amino acids in length and wherein at least 7 contiguous amino acids are at least 75% identical or homologous to at least 7 contiguous amino acids of said corresponding Cockroach a protein or peptide set forth in any of Tables 5-8.

[0030] In further particular aspects, a subsequence, homologue, or variant is: i. a peptide of up to 30 amino acids in length which comprises an amino acid sequence of a protein or peptide set forth in any of Tables 5-8; or ii. a peptide of 7 to 30 amino acids in length which comprises a subsequence of at least 7 contiguous amino acids having at least 75% identity or homology to at least 7 contiguous amino acids of a protein or peptide set forth in any of Tables 5-8.

[0031] Cockroach proteins and peptides include isolated and/or purified amino acid sequences, subsequences, homologues, variants and derivatives thereof. Proteins and peptides also include those immobilized on a substrate, as well as amino acid sequences, subsequences, portions, homologues, variants, and derivatives immobilized on a substrate. Such amino acid sequences, subsequences, homologues, and variants can have a unique or distinct position or address on the substrate. Non-limiting substrates include glass, silica, plastic, polyethylene, polystyrene, polypropylene, polyacetate, polycarbonate, polyimide, polyester, polyurethane, or polyvinylchloride.

[0032] Proteins and peptides can be included in compositions, for example, a pharmaceutical composition. In particular embodiments, a pharmaceutical composition is suitable for specific or non-specific immunotherapy, or is a vaccine composition.

[0033] Isolated nucleic acid (including isolated nucleic acid) encoding a protein or peptide (Cockroach protein or peptide), or a subsequence, portion, homologue, variant or derivative thereof are provided. Such embodiments include any protein or peptide set forth herein. In one embodiment, a nucleic acid encodes an amino acid sequence of a protein or peptide set forth in any of Tables 5-8, or a subsequence, portion, homologue, variant or derivative thereof.

[0034] Also provided are cells expressing a protein or peptide described herein. In various embodiments, a cell expresses a Cockroach protein that includes, consists of or consists essentially of an amino acid sequence of a protein or peptide set forth in any of Tables 5-8, or a subsequence, portion, homologue, variant or derivative thereof, or a protein or peptide set forth in Tables 5 or 6. Non-limiting examples of cells include eukaryotic cells, prokaryotic cells, mammalian, insect, fungal (yeast) and bacterium.

[0035] Methods and uses and medicaments of Cockroach proteins and peptides of the invention are included. In various embodiments, there are provided methods and uses of and medicaments for modulating an immune response against a Cockroach allergen in a subject. In one embodiment, a method or use includes administering (delivering or contacting) to a subject an amount of a protein described herein (e.g., a protein or peptide set forth in any of Tables 5-8, or a subsequence, portion, homologue, variant or derivative thereof, or a protein or peptide set forth in Tables 5 or 6, or a subsequence, portion, homologue, variant or derivative thereof) sufficient to modulate the immune response against the allergen in the subject. In further embodiments, there are provided uses of Cockroach proteins and peptides for manufacture of a medicament to modulate the immune activity of a cell against a Cockroach allergen.

[0036] Such methods, uses and medicaments also include for example and without limitation, modulating immune activity of a cell against an allergen; and desensitizing, inducing, eliciting, increasing or improving in the cell immunological tolerance to an allergen. In particular embodiments, a method or use includes contacting a cell with an amount of the protein or peptide of any one of the embodiments disclosed herein (e.g., a protein or peptide set forth in any of Tables 5-8) or a subsequence, portion, homologue, variant or derivative thereof, or a protein or peptide set forth in Tables 5 or 6, or a subsequence, portion, homologue, variant or derivative thereof), sufficient to modulate the immune activity of the cell against the allergen (e.g., against an allergen from which the peptide or protein derives), or administering to a subject an allergen from which the peptide or protein derives in order to desensitize, induce, elicit, increase or improve immunological tolerance to the allergen or to modulate an immune response against an allergen in a subject (e.g., an allergen from which the peptide or protein derives, e.g., a protein or peptide set forth in any of Tables 5-8) or a subsequence, portion, homologue, variant or derivative thereof, or a protein or peptide set forth in Tables 5 or 6, or a subsequence, portion, homologue, variant or derivative thereof).

[0037] Invention proteins, peptides, subsequences, portions, homologues, variants and derivatives thereof are suitable as a reagent for example, for specific immunotherapy (SIT). In particular embodiments, a protein or peptide suitable as a reagent includes, consists of or consists essentially of an amino acid sequence of a protein or peptide set forth in any of Tables 5-8, or a subsequence, portion, homologue, variant or derivative thereof, or a protein or peptide set forth in Tables 5 or 6, or a subsequence, portion, homologue, variant or derivative thereof.

[0038] Such methods, uses and medicaments further include reducing risk or providing a subject protection against an allergic reaction, allergic response, allergic disorder or allergic disease. In one embodiment, a method or use includes administering to the subject an amount of the Cockroach protein or peptide (e.g., a protein or peptide set forth in any of Tables 5-8) or a subsequence, portion, homologue, variant or derivative thereof, or a protein or peptide set forth in Tables 5 or 6, or a subsequence, portion, homologue, variant or derivative thereof) sufficient to reduce risk or provide the subject with protection against the allergic reaction, allergic response, allergic disorder or allergic disease (e.g., caused by or associated with a Cockroach allergen).

[0039] Such methods, uses and medicaments additionally include treating an allergic reaction, allergic response, allergic disorder or allergic disease. In one embodiment, a method or use includes administering to the subject an amount of the Cockroach protein or peptide (e.g., a protein or peptide set forth in any of Tables 5-8) or a subsequence, portion, homologue, variant or derivative thereof, or a protein or peptide set forth in Tables 5 or 6, or a subsequence, portion, homologue, variant or derivative thereof), sufficient to treat the subject for the allergic response, allergic disorder or allergic disease (e.g., caused by or associated with a Cockroach allergen).

[0040] In such methods, uses and medicaments, a peptide or protein can be derived from or based upon the (Cockroach) allergen or can be derived from or based upon an allergen originating from the same organism as the allergen. More particularly, for example, a protein or peptide can be derived from or based upon a Cockroach allergen that contributes to or causes the allergic reaction, allergic response, allergic disorder or allergic disease or said peptide derives from an allergen belonging to the same organism as the allergen causing said allergic reaction, allergic response, allergic disorder or allergic disease. Additionally, for example, a protein or peptide can be based upon or derived from a Cockroach protein or peptide set forth in any of Tables 5-8, or a subsequence, portion, homologue, variant or derivative thereof, or a protein or peptide set forth in Table 5 or 6, or a subsequence, portion, homologue, variant or derivative thereof.

[0041] In various embodiments, a method or use or medicament desensitizes or induces, elicits, increases or improves immunological tolerance of a subject to a Cockroach allergen. In particular aspects, a method or use or medicament that desensitizes or induces, elicits, increases or improves immunological tolerance of a subject to a Cockroach allergen is a protein or peptide in any of Tables 5-8 or a subsequence, portion, homologue, variant or derivative thereof, or a protein or peptide set forth in Tables 5 or 6, or a subsequence, portion, homologue, variant or derivative thereof. In various other embodiments, a method or use or medicament desensitizes or induces, elicits, increases or improves immunological tolerance of a subject to a protein or peptide set forth in Tables 5-8, or a subsequence, portion, homologue, variant or derivative thereof, or a protein or peptide set forth in Tables 5 or 6, or a subsequence, portion, homologue, variant or derivative thereof.

[0042] In various further embodiments, a method or use or medicament reduces risk or provides the subject with protection against an allergic reaction, allergic response, allergic disorder or allergic disease (e.g., caused by or associated with a Cockroach allergen), wherein the method or use or medicament includes a protein or peptide set forth in any of Tables 5-8, or a subsequence, portion, homologue, variant or derivative thereof, or a protein or peptide set forth in Tables 5 or -6, or a subsequence, portion, homologue, variant or derivative thereof.

[0043] In various additional embodiments, a method or use or medicament treats an allergic reaction, allergic response, allergic disorder or allergic disease (e.g., caused by or associated with a Cockroach allergen), comprising wherein the method or use or medicament includes a protein or peptide set forth in any of Tables 5-8 or a subsequence, portion, homologue, variant or derivative thereof, or a protein or peptide set forth in Tables 5 or 6, or a subsequence, portion, homologue, variant or derivative thereof.

[0044] Allergic reactions, allergic responses, allergic disorders and allergic diseases as set forth herein include those caused by or associated with Cockroach exposure, contact with a Cockroach allergen or contact with an allergen homologous to a Cockroach allergen.

[0045] As set forth herein a Cockroach protein, peptide, method, use or medicament can include administration or delivery by any means to a subject, systemically, regionally or locally. In particular aspects, a protein or peptide is administered cutaneously, subcutaneously, epicutaneously, intracutaneously, intramuscularly, intravenously, orally, mucosally, by inhalation or nasally. As also set forth herein a Cockroach protein, peptide, method, use or medicament can include repeatedly contacting a cell with, or administrations to a subject, the protein or peptide, multiple times (e.g., a protein or peptide set forth in any of Tables 5-8) or a subsequence, portion, homologue, variant or derivative thereof, or a protein or peptide set forth in Tables 5 or 6, or a subsequence, portion, homologue, variant or derivative thereof).

[0046] As set forth herein, subjects in accordance with the invention include mammals, such as humans. In particular embodiments, a subject has exhibited a symptom of, or suffers from, an allergic reaction, allergic response, allergic disorder or allergic disease (e.g., caused by or associated with a Cockroach allergen). In more particular embodiments, a subject has had an allergic reaction or allergic response to a Cockroach allergen. In further particular embodiments, a subject has, has previously had or is at risk of having asthma or hypersensitivity to a Cockroach allergen. In additional particular embodiments, a subject has had an allergic reaction or allergic response to an allergen derived from or produced by Cockroach, such as an allergen or an amino acid sequence set forth in Tables 5-8, or a subsequence, portion, homologue, variant or derivative thereof, or a protein or peptide set forth in Tables 5 or 6, or a subsequence, portion, homologue, variant or derivative thereof. In still additional particular embodiments, a subject has had an allergic reaction or allergic response to a Cockroach enolase, Hsp60, RACK1, TP1, trypsin, vitellogenin, Bla g 1, Bla g 1.0101, Bla g 2, Bla g 4, Bla g 5, Bla g 6, Bla g 6.0101, Bla g 6.0201, Bla g 7, Bla g 9, Bla g 11, NBGA1, NBGA2, NBGA3, NBGA4, NBGA5, NBGA6, NBGA7, NBGA8, NBGA9, NBGA10, NBGA11, NBGA12, NBGA13, NBGA14, NBGA15, or NBGA16 protein In still further particular embodiments, the Cockroach allergen is an IgG or IgE reactive antigen or allergen.

[0047] Proteins and peptides can be deployed in diagnostic and detection methods and uses. In one embodiment, detecting an allergic response, or diagnosing an allergy in a subject, a method or use includes contacting a cell from the subject (which may be an ex vivo or in vivo cell) with a protein or peptide as set forth herein; and determining if the protein or peptide modulates an immune response or activity from the contacted cell. If the protein or peptide modulates an immune response or activity from the contacted cell (which may be an in vitro, ex vivo or in vivo cell) detects an allergic response or indicates that the subject has an allergic response or an allergy. In a particular aspect, the allergic response or allergy comprises a Cockroach allergic response or allergy. In another particular aspect, modulation of immune response or activity is determined by assaying for a hypersensitive reaction or response, such as a cutaneous (e.g., skin) immunological hypersensitive reaction.

[0048] Proteins and peptides can be deployed in kits and uses. In one embodiment, a kit includes a compartment and instructions, which compartment includes: one or more amino acid sequences of an allergen (e.g., Cockroach) or a protein or peptide set forth in any of Tables 5-8, or a subsequence, portion, homologue, variant or derivative thereof, or a protein or peptide set forth in Tables 5 or 6, or a subsequence, portion, homologue, variant or derivative thereof; and instructions for use in any of: modulating an immune response or activity of a cell against an allergen; modulating an immune response against an allergen in a subject; desensitizing, or inducing, eliciting, increasing or improving immunological tolerance to a protein or peptide allergen; reducing risk or providing a subject protection against an allergic reaction, allergic response, allergic disorder or allergic disease; treating an allergic reaction, allergic response, allergic disorder or allergic disease; or detecting an allergic response or diagnosing an allergy in a subject.

### DESCRIPTION OF DRAWINGS

[0049] FIGS. 1A-1C show CD4⁺ T Cell Reactivity to Bla g Allergens. A) Overall responses (sum of all peptide and cytokine responses) to BLAGA after 14-day expansion with Bla g extract followed by 24-hour stimulation with BLAGA peptides. B) Individual BLAGA responses (sum of all cytokines) of Bla g sensitized and control subjects. C) Pattern of cytokine responses detected against BLAGA Geometric means and 95% confidence intervals shown. Black circles represent Bla g sensitized subjects, and gray open circles represent controls. *p≤0.05, **p≤0.005 by non-parametric Mann-Whitney t-test.

[0050] FIGS. 2A-2B show Identification of Novel Bla g antigens by 2-D Gel Immunoblot. A) Coomassie stain of 2-D gel of Bla g extract. B) Separated Bla g extract stained with pooled serum from 15 Bla g allergic subjects. Green spots indicate IgE binding; red spots indicate IgG binding; and yellow spots indicate dual IgE/IgG binding. Yellow circles indicate sections selected for proteomic analysis.

[0051] FIGS. 3A-3B show CD4⁺ T Cell Reactivity to Novel Bla g Antigens. A) Individual NBGA responses (sum of all cytokines) of Bla g sensitized and control subjects after 14-day expansion with Bla g extract followed by 24-hour stimulation with NBGA peptides. B) Pattern of cytokine responses detected against IgE+ and IgE− NBGA in allergic and control subjects. Geometric means and 95% confidence intervals shown. ****p<0.0001,***p<0.001,**p<0.01, by non-parametric Mann-Whitney t-test.

[0052] FIGS. 4A-4B show Immunodominance of Bla g Epitopes. A) Comparison of the percentage of the total cytokine response per epitope. BLAGA represented by blue circles. Combined BLAGA and NBGA represented by black circles. B) Comparison of the number of epitopes recognized per subject among the Bla g sensitive subjects.

[0053] FIG. 5 shows Changing Magnitude and Polyfunctionality of Responses Among Asthma Severities. Height of pie chart is proportional to geometric mean of the total sum of responses for subject group. Numerical values inside pie charts are percentage of total response encompassed by the individual cytokine response. Red denotes relative proportion of IFNγ responses, blue IL-5, green IL-10, purple, IL-17, and gray IL-21. *p<0.05, **p<0.005, calculated by non-parametric Mann-Whitney t-test.

[0054] FIGS. 6A-6C show Differential Immunodominance of Bla g Antigens as a Function of Allergic Clinical Status. Percentage response accounted by individual antigens of total cytokine response to all Bla g Antigens for (A) Control, (B) Allergic Rhinitis, and (C) Asthmatic Allergic subjects. “Other” category encompasses antigens accounting individually for <1% of total response for all three groups.

[0055] FIGS. 7A-7D show Epitope Sets Correctly Predict Bla g Sensitivity and Asthma. Response to specific epitope set as a percentage of total response for (A) Asthmatic and (B) AR after overnight stimulation with epitope pools following two week culture in the presence of epitope pools with corresponding magnitudes (C-D).

### DETAILED DESCRIPTION

[0056] In accordance with the invention, there are provided novel Cockroach proteins and peptides, and subsequences, portions, homologues, variants and derivatives thereof. A Cockroach protein or peptide as described herein may include any Cockroach protein or peptide, or a subsequence, portion, homologue, variant or derivative thereof. In certain embodiments, a Cockroach protein or peptide as described herein may include a novel Cockroach protein or peptide, for example, as set forth in any of Tables 5-8, or a subsequence, portion, homologue, variant or derivative thereof.

[0057] In particular embodiments, a Cockroach protein or peptide described herein includes, consists or consists essentially of a protein or peptide having an amino acid sequence set out in or a protein or peptide set forth in any of Tables 5 or 6 or a subsequence, portion, homologue, variant or derivative thereof, or a protein or peptide set forth in Table 6, or a subsequence, portion, homologue, variant or derivative thereof.

[0058] In particular embodiments, a Cockroach protein described herein includes, consists or consists essentially of an amino acid sequence set out in Table 7 or a subsequence, portion, homologue, variant or derivative thereof.

[0059] In particular embodiments, a Cockroach protein or peptide described herein includes, consists or consists essentially of a protein or peptide having an amino acid sequence set forth as (SEQ ID NOs.: 1-23): TIPYYTKKFDEVVKA, ISDFRAAIANYHYDA, YFVAILDYLNHMAKE, VAISRYLGKQFGLSG, MIVDTISDFRAAIAN, DLVANQPNLKALREK, HDDRLGFLTFCPTNL, KNRTTIRGRTKFEGN, DRKMYWQFKMDKIQI, ALREKVLGLPAIKAW, IRGRTKFEGNKFTID, NDIEKRVPFSHDDRL, HMAKEDLVANQPNLK, VLEKLEAGFAKLAAS, NYAIVEGCPAAANGH, GIRIYVDVVLNQMSG, RWRQIFNMVGFRNAV, NIACLLHNKYDSTKS, NGGYLAAGKLTWADF, LNIFTNNLGRINTHV, KTPVLEIDGKQTHQS, PAYFKMNSPSLWKYN, or PKSMLLNIFTNNLGR, or a subsequence, portion, homologue, variant or derivative thereof.

[0060] In other embodiments of the invention, a Cockroach protein or peptide described herein includes, consists or consists essentially of an amino acid sequence set forth as (SEQ ID NOs.: 1-23): TIPYYTKKFDEVVKA, ISDFRAAIANYHYDA, YFVAILDYLNHMAKE, VAISRYLGKQFGLSG, MIVDTISDFRAAIAN, DLVANQPNLKALREK, HDDRLGFLTFCPTNL, KNRTTIRGRTKFEGN, DRKMYWQFKMDKIQI, ALREKVLGLPAIKAW, IRGRTKFEGNKFTID, NDIEKRVPFSHDDRL, HMAKEDLVANQPNLK, VLEKLEAGFAKLAAS, NYAIVEGCPAAANGH, GIRIYVDVVLNQMSG, RWRQIFNMVGFRNAV, NIACLLHNKYDSTKS, NGGYLAAGKLTWADF, LNIFTNNLGRINTHV, KTPVLEIDGKQTHQS, PAYFKMNSPSLWKYN, or PKSMLLNIFTNNLGR.

[0061] In other embodiments, a Cockroach protein or peptide described herein includes, consists or consists essentially of a subsequence, portion, homologue, variant or derivative of an amino acid sequence set forth as (SEQ ID NOs.: 1-23): TIPYYTKKFDEVVKA, ISDFRAAIANYHYDA, YFVAILDYLNHMAKE, VAISRYLGKQFGLSG, MIVDTISDFRAAIAN, DLVANQPNLKALREK, HDDRLGFLTFCPTNL, KNRTTIRGRTKFEGN, DRKMYWQFKMDKIQI, ALREKVLGLPAIKAW, IRGRTKFEGNKFTID, NDIEKRVPFSHDDRL, HMAKEDLVANQPNLK, VLEKLEAGFAKLAAS, NYAIVEGCPAAANGH, GIRIYVDVVLNQMSG, RWRQIFNMVGFRNAV, NIACLLHNKYDSTKS, NGGYLAAGKLTWADF, LNIFTNNLGRINTHV, KTPVLEIDGKQTHQS, PAYFKMNSPSLWKYN, or PKSMLLNIFTNNLGR.

[0062] In further embodiments, a Cockroach protein or peptide described herein includes, consists or consists essentially of a Cockroach enolase, Hsp60, RACK1, TP1, trypsin, vitellogenin or aNBGA protein (such as NBGA1, NBGA2, NBGA3, NBGA4, NBGA5, NBGA6, NBGA7, NBGA8, NBGA9, NBGA10, NBGA11, NBGA12, NBGA13, NBGA14, NBGA15, or NBGA16), e.g. a Cockroach allergen/antigen set forth in Table 5.

[0063] In certain embodiments, a Cockroach protein, peptide, subsequence, portion, homologue, variant or derivative thereof, includes, consists of or consists essentially of an amino acid sequence of a portion of a Cockroach allergen protein or peptide enolase, Hsp60, RACK1, TP1, trypsin, vitellogenin, Bla g 1, Bla g 1.0101, Bla g 2, Bla g 4, Bla g 5, Bla g 6, Bla g 6.0101, Bla g 6.0201, Bla g 7, Bla g 9, Bla g 11.

[0064] The foregoing and other Cockroach proteins and peptides set forth herein may be used in the methods and uses and medicaments, including but not limited to methods and uses and medicaments disclosed herein.

[0065] In particular embodiments, a protein or peptide includes, consists of or consists essentially of a Cockroach protein or peptide set forth in any of Tables 5-8, or a subsequence, portion, homologue, variant or derivative thereof, or a protein or peptide set forth in Tables 5 or 6, or a subsequence, portion, homologue, variant or derivative thereof. Said homologues may have at least 65%, 70, 75, 80, 85, 90 or 95% homology or identity to the corresponding Cockroach protein or peptide. Such subsequences may be 7 to 30 amino acids in length, and optionally further where at least 7 amino acids has at least 75%, or at least 80%, 85%, 90% identity or homology to at least 7 contiguous amino acids of the corresponding Cockroach protein or peptide. Moreover, a subsequence may be 7 to 25 amino acids in length, such as 7 to 20; 8 to 30; 8 to 25; 8 to 20; 9 to 30; 9 to 25; 9 to 20; 10 to 30; 10 to 25; 10 to 30 amino acids in length and wherein at least 8, such as at least 9, 10, 11, 12, 13, 14 or 15 amino acids of the subsequence has at least 75%, such as at least 80%, 85%, 90% identity or homology to at least 8, such as at least 9, 10, 11, 12, 13, 14 or 15 amino acids, respectively, contiguous amino acids of said corresponding Cockroach protein or peptide.

[0066] A variant of a Cockroach protein or peptide, such as a protein or peptide set forth in any of Tables 5-8 may be a longer peptide, for example, of up to 30 amino acids in length and which includes a corresponding protein or peptide as set forth in any of Tables 5-8. A variant may also include a peptide of 7 to 30 amino acids in length and which includes a subsequence of at least 7 amino acids having at least 75% identity or homology, such as at least 80 or 85% identity or homology, to at least 7 contiguous amino acids of the corresponding amino acid sequence of a protein or peptides set forth in any of Tables 5-8. A longer variant peptide may be up to 25 amino acids in length, such as up to 24, 23, 22, 21, 20, 19 or 18 amino acids in length. The variant may be a peptide of 7 to 25 amino acids in length, such as 7 to 20; 8 to 30; 8 to 25; 8 to 20; 9 to 30; 9 to 25; 9 to 20; 10 to 30; 10 to 25; 10 to 30 amino acids in length and wherein said subsequence is of at least 8, 9 or 10 amino acids having at least 75% (such as at least 80% or 85%) identity or homology to at least 8, 9 or 10 contiguous amino acids, respectively, of said corresponding protein or peptide set forth in any of Tables 5-8.

[0067] As used herein, an “antigen” refers to a substance, including but not limited to a protein or peptide that elicits, induces, stimulates, promotes or enhances an immune response when administered to a subject. An immune response elicited by an antigen may include, but is not limited to, a B cell or a T cell response. An immune response can include a cellular response with a particular pattern of lymphokine/cytokine production (e.g., Th1, Th2), a humoral response (e.g., antibody production), or a combination thereof, to a particular antigen. For example, if a subject previously exposed to an allergen (i.e., is sensitized or is hypersensitive) comes into contact with the allergen again, allergic asthma may develop due to a Th2 response characterized by an increased production of type 2 cytokines (e.g., IL-4, IL-5, IL-9, and/or IL-13) secreted by CD4+ T lymphocytes.

[0068] As used herein an “epitope” refers to a region or part of an antigen that elicits an immune response when administered to a subject. In particular embodiments, an epitope may be comprised of a region or part of a Cockroach protein or peptide (e.g, of all or a part of an amino acid sequence of a Cockroach protein or peptide set forth in any of Tables 5-8. In more particular embodiments, an epitope may be comprised of a region or part of a Cockroach protein or peptide set forth in any of Table 5 or 6, or a protein or peptide set forth in Table 5. In particular aspects, an epitope is a T cell epitope, i.e., an epitope that elicits, stimulates, induces, promotes, increases or enhances a T cell activity, function or response.

[0069] An antigen, epitope, allergen, or composition thereof can modulate an undesired or abnormal inflammatory response. An antigen, epitope, allergen, or composition thereof as described herein may alter the Th2 response by, for example, shifting the immune response toward a Th1 phenotype that is less damaging. That is, an altered (or modulated) immune response can decrease, inhibit, suppress, or reduce sensitivity (desensitize) to an antigen, epitope, or allergen, or against inflammatory responses (e.g., allergy, asthma, rash, wheezing, coughing, eye irritation, etc.) caused by an antigen, epitope, or allergen (e.g., a Cockroach protein or peptide set forth in any of Tables 5-8), or a protein or peptide set forth in Tables 5 or 6 or Table 5).

[0070] Accordingly, non-limiting examples of antigens and allergens are peptides and proteins having defined amino acid sequences and which comprise T cell epitopes, i.e., elicit, stimulate, induce, promote, increase or enhance a T cell response or activity. Antigens and allergens can be analyzed to determine whether they include at least one T cell epitope using any number of assays (e.g. T cell proliferation assays, lymphokine secretion assays, T cell non-responsiveness studies, etc.).

[0071] The term “allergen” refers to an antigen which elicits, induces, stimulates, or enhances an immune response by a cell or the immune system of an exposed animal (e.g., human). An antigen is an allergen when the specific immune response is the development of enhanced sensitivity or a hypersensitivity to the antigen, but the antigen itself is not typically innately harmful. An allergen is therefore a particular type of antigen that can cause development of enhanced or increased sensitivity or hypersensitivity in a subject. For example, an allergen can elicit production of IgE antibodies in predisposed subjects. However, as disclosed herein an allergen need not elicit production of IgE antibodies. Other examples of responses elicited by allergens include T cell responses or activity, such as production of a lymphokine, cytokine, or effector function on other cells. Responses caused by allergens are also described, for example, in Mol. Biol. of Allergy and Immunology, ed. R. Bush, Immunology and Allergy Clinics of North American Series (August 1996). Although the terms “allergen” and “antigen” have a different meaning, reference to “allergen” herein includes reference to “antigen” and reference to “antigen” herein includes reference to “allergen.”

[0072] Typically, allergens are organic substances, such as proteins, peptides, nucleotides, carbohydrates, lipids, fats, nucleic acid, and combinations or mixtures thereof. Allergen(s) as used herein include, but are not limited to a specific allergen protein, mixture of allergen proteins, an extract of an allergen, chemically or genetically manufactured allergen, or any combination thereof (e.g., a Cockroach allergen such as a protein or peptide of Cockroach enolase, Hsp60, RACK1, TP1, trypsin, vitellogenin, Bla g 1, Bla g 1.0101, Bla g 2, Bla g 4, Bla g 5, Bla g 6, Bla g 6.0101, Bla g 6.0201, Bla g 7, Bla g 9, Bla g 11, NBGA1, NBGA2, NBGA3, NBGA4, NBGA5, NBGA6, NBGA7, NBGA8, NBGA9, NBGA10, NBGA11, NBGA12, NBGA13, NBGA14, NBGA15, or NBGA16) or a protein or peptide set forth in Tables 5-8, Tables 5 or 6, or Table 5. Particular examples include a Cockroach enolase, Hsp60, RACK1, TP1, trypsin, vitellogenin, or a NBGA (such as NBGA1, NBGA2, NBGA3, NBGA4, NBGA5, NBGA6, NBGA7, NBGA8, NBGA9, NBGA10, NBGA11, NBGA12, NBGA13, NBGA14, NBGA15, or NBGA16).

[0073] In certain embodiments, proteins, peptides, subsequences, portions, homologues, variants and derivatives thereof, described herein (e.g., a Cockroach protein or peptide set forth in any of Tables 5-8, or a protein or peptide set forth in Tables 5 or 6 stimulate, induce, promote, increase or enhance an immune response. In particular embodiments, a protein or peptide is a T cell antigen, allergen or epitope. In additional particular embodiments, a protein or peptide, a subsequence, portion, homologue, variant or derivative thereof, elicit, stimulate, promote, induce or enhance a T cell response, which may include but is not limited to a Th2 cell response. In further particular embodiments, a Cockroach protein or peptide, a subsequence, portion, homologue, variant or derivative thereof, modulates, inhibits, or reduces T cell response, which may include but is not limited to a Th2 cell response. In certain embodiments, a T cell response is an anti-allergen immune response, including but not limited to an anti-Cockroach allergen immune response.

[0074] As used herein, the term “immune response” includes T cell (cellular) mediated and/or B cell (humoral) mediated immune responses, or both cellular and humoral responses. Exemplary immune responses include T cell responses, e.g., lymphokine production, cytokine production and cellular cytotoxicity. T-cell responses include Th1 and/or Th2 responses. In addition, the term immune response includes responses that are indirectly effected by T cell activation, e.g., antibody production (humoral responses) and activation of cytokine responsive cells, e.g., eosinophils, macrophages. Immune cells involved in the immune response include lymphocytes, such as T cells (CD4+, CD8+, Th1 and Th2 cells, memory T cells) and B cells; antigen presenting cells (e.g., professional antigen presenting cells such as dendritic cells, macrophages, B lymphocytes, Langerhans cells, and non-professional antigen presenting cells such as keratinocytes, endothelial cells, astrocytes, fibroblasts, oligodendrocytes); natural killer (NK) cells; myeloid cells, such as macrophages, eosinophils, mast cells, basophils, and granulocytes.

[0075] As set forth herein, a particular immunoglobulin (Ig) isotype may be produced in response to an antigen (allergen). For example, an “IgG antigen” refers to an antigen that induces an IgG antibody response. Likewise, an “IgE antigen” refers to an antigen that induces an IgE antibody response; an “IgA antigen” refers to an antigen that induces an IgA antibody response, and so forth. In certain embodiments, such an immunoglobulin (Ig) isotype produced in response to an antigen may also elicit production of other isotypes. For example, an IgG antigen may induce an IgG antibody response in combination with one more of an IgE, IgA, IgM or IgD antibody response. Accordingly, in certain embodiments, an IgG antigen may induce an IgG antibody response without inducing an IgE, IgA, IgM or IgD antibody response.

[0076] The invention encompasses methods and uses and medicaments for reducing, decreasing, preventing the development of sensitization or hypersensitization to an antigen(s) or allergen(s), such as a Cockroach antigen or allergen. Accordingly, in other embodiments, a protein or peptide, subsequence, portion, homologue, variant or derivative thereof (e.g., a Cockroach protein or peptide set forth in any of Tables 5-8, or a protein or peptide set forth in Tables 5 or 6 or Table 5, decreases, inhibits, suppresses or reduces a T cell response, which may include but is not limited to a Th2 cell response. In certain embodiments, the T cell response is an anti-Cockroach allergen immune response, such as a memory T cell response.

[0077] In accordance with another aspect of the invention there are provided a Cockroach protein or peptide, a subsequence, portion, homologue, variant or derivative thereof, wherein the protein or peptide elicits, stimulates, induces, promotes, increases or enhances an anti-allergen immune response. In another aspect, there are provided a Cockroach protein or peptide, subsequence, portion, homologue, variant or derivative thereof, wherein the protein or peptide decreases, reduces, inhibits, suppresses or disrupts an anti-allergen immune response.

[0078] As will be understood by a person of skill in the art, a protein or a subsequence, portion, homologue, variant or derivative thereof as described herein (e.g., Cockroach protein or peptide set forth in any of Tables 5-8) may elicit, stimulate, induce, promote, increase or enhance certain elements of an anti-allergen immune response while decreasing, reducing, inhibiting, suppressing or reducing other elements of the anti-allergen response, either contemporaneously or sequentially. In one non-limiting example, a protein or a subsequence, portion, homologue, variant or derivative thereof (e.g., Cockroach protein or peptide set forth in any of Tables 5-8) may elicit, stimulate, induce, promote, increase or enhance proliferation of regulatory T cells while decreasing, reducing, inhibiting, suppressing or reducing production of proinflammatory lymphokines/cytokines.

[0079] An “anti-allergen,” “anti-protein,” or “anti-peptide immune response” refers to an immune response that is particular or specific for the protein or peptide, e.g., allergen. In such instances, the response is specifically triggered (elicited, stimulated, increased, induced, or promoted) by the protein or peptide, e.g., allergen (e.g., a Cockroach protein or peptide set forth in any of Tables 5-8). Although an “anti-allergen” immune response is specifically triggered by a given allergen, the immune response itself can be characterized by general features of immune responses, such as T cell (cellular) and/or B cell (humoral) immune responses, as set forth herein.

[0080] As disclosed herein, a Cockroach protein, peptide, subsequence, portion, homologue, variant or derivative thereof, may elicit, stimulate, induce, promote, increase or enhance immunological tolerance to an antigen, including an allergen (e.g., Cockroach protein or peptide set forth in any of Tables 5-8). In certain embodiments, a Cockroach protein, peptide, subsequence, portion, homologue, variant or derivative thereof, described herein may elicit, stimulate, induce, promote, increase or enhance immunological tolerance to an allergen. Thus in certain embodiments a protein, peptide, subsequence, portion, homologue, variant or derivative thereof, described herein may be effective in use or treatment (e.g., therapeutic) of an allergic reaction or allergic immune response, including but not limited to an allergic response following a secondary or subsequent exposure of a subject to an antigen or allergen. In particular embodiments, immunological tolerance elicited, stimulated, induced, promoted, increased or enhanced from use or administration of a Cockroach protein, peptide, subsequence, portion, homologue, variant or derivative thereof, may involve modulation of T cell activity, including but not limited to CD4+ T cells, CD8+ T cells, Th1 cells, Th2 cells and regulatory T cells (Tregs), and memory T cells. For example, immunological tolerance elicited, stimulated, induced, promoted, increased or enhanced from use or administration of a Cockroach protein, peptide, subsequence, portion, homologue, variant or derivative thereof (e.g., Cockroach protein or peptide set forth in any of Tables 5-8)-inflammatory lymphokines/cytokines produced by T cells. Thus, in accordance with certain aspects of the invention, there are provided Cockroach proteins, peptides, subsequences, portions, homologues, variants and derivatives thereof, that elicit, stimulate, induce, promote, increase or enhance immunological tolerance to an antigen or allergen (e.g., a Cockroach protein or peptide).

[0081] Accordingly, methods and uses and medicaments of inducing immunological tolerance in a subject to an allergen are provided. In one embodiment, a method or use reduces occurrence, frequency, severity, progression, or duration of physiological conditions, disorders, illnesses, diseases, symptoms or complications caused by or associated an allergic response to the allergen in the subject. Thus, in various embodiments, inducing immunological tolerance can protect a subject against or treat a subject for an allergic response, allergic disorder or allergic disease, or one or more physiological conditions, disorders, illnesses, diseases, symptoms or complications caused by or associated with an allergen.

[0082] As disclosed herein, surprisingly Cockroach proteins and antigens that elicit Th2 immune responses are not a priori IgE reactive. Thus, there are provided methods and uses of providing specific immunotherapy to a subject, in which a subject is administered an amount of a Cockroach protein or peptide that is (or is not) an IgE, IgG, IgA, IgM or IgD reactive antigen. In a particular embodiment, a method or use includes administering to the subject an amount of a Cockroach protein or peptide that is not an IgE reactive antigen.

[0083] Also provided are methods and uses and medicaments of providing specific immunotherapy (SIT) to a subject. In one embodiment, a subject is administered an amount of a Cockroach protein or peptide (e.g., Cockroach protein or peptide set forth in any of Tables 5-8).

[0084] In certain embodiments of the invention methods and uses and medicaments, the allergen is a Cockroach protein or peptide (e.g., a Cockroach allergen such as Cockroach enolase, Hsp60, RACK1, TP1, trypsin, vitellogenin, Bla g 1, Bla g 1.0101, Bla g 2, Bla g 4, Bla g 5, Bla g 6, Bla g 6.0101, Bla g 6.0201, Bla g 7, Bla g 9, Bla g 11, NBGA1, NBGA2, NBGA3, NBGA4, NBGA5, NBGA6, NBGA7, NBGA8, NBGA9, NBGA10, NBGA11, NBGA12, NBGA13, NBGA14, NBGA15, or NBGA16). In more particular embodiments, the allergen is an amino acid sequence of Cockroach protein or peptide set forth in any of Tables 5-8, or a subsequence, portion, homologue, variant or derivative thereof. In other non-limiting embodiments, the allergen includes, consists of or consists essentially of a Cockroach protein or peptide set forth in any of Tables 5-8.

[0085] An allergic reaction refers to a local or general reaction in a subject following contact with a specific antigen (e.g., allergen) to which the subject had been previously exposed and had become sensitized. The immunologic interaction of antigen (e.g., allergen) with sensitized lymphocytes (T cells) and/or antibody can give rise to inflammation and tissue damage. An allergy is an undesirable immune response or reaction that can therefore produce damage to self-tissues and cells, usually through inflammatory reactions.

[0086] One non-limiting example of an allergy is asthma. Asthma, which can be extrinsic or allergic asthma (also referred to as reactive airway disease), is an inflammatory disease of the lungs characterized by a generally reversible airway obstruction. Non-limiting features of allergic asthma include elevated concentrations of serum IgE, pulmonary eosinophilia, airway hyper-responsiveness, excessive airway mucus production, and airway remodeling marked by peribronchiolar collagen deposition and increases in airway smooth muscle mass. Other exemplary allergic reactions or inflammatory conditions include allergic alveolitis, allergic bronchopulmonary aspergillosis, allergic dermatitis, eczema, allergic conjunctivitis, allergic coryza, allergic vasculitis, rhinosinusitis, and allergic rhinitis.

[0087] Hypersensitivity or hyper-responsiveness used in reference to an immune response means an abnormal response or condition in which an antigen or allergen elicits an exaggerated immune response. For example, allergic asthma can result from repeated exposure to airborne allergens that trigger detrimental immunological responses, such as persistent inflammation in the bronchial wall, which can in turn cause structural and functional changes in the respiratory system. After allergen contact by sensitized subjects (i.e., those subjects that have already been exposed to the allergen), the immune response is dependent on CD4+ T lymphocytes that are skewed to a T helper (Th) 2 phenotype. Th2 cytokines, for example, IL-4, IL-5, IL-9, and IL-13 are produced and are believed to contribute to asthma pathogenesis. For example, IL-4 drives the T helper response in favor of Th2, resulting in enhanced production of IgE; IL-5, which with granulocyte macrophage colony stimulating factor (GM-CSF) and IL-3, is important for the production of eosinophils; and IL-13, which is required for airway hyper-responsiveness and mucous metaplasia, which are downstream pathophysiological features that are closely linked with clinical asthma. All of these cytokines have been implicated in airway remodeling. Increased numbers of airway eosinophils is also associated with disease severity, although the role of eosinophils in the pathology of asthma is not entirely understood, (see, e.g., Lee et al., Science 305:1773 (2004); Humbles et al., Science 305:1776 (2004)). The resulting structural and morphometric changes (remodeling) include subepithelial fibrosis, goblet cell hyperplasia and metaplasia, which result in functional consequences such as loss of distensibility of asthmatic airways, bronchial hyper-reactivity (even in the absence of the allergen), and an accelerated progressive decrease in forced expiratory volume at 1 second time intervals. Th2 cytokines may also prime and activate eosinophils to release proinflammatory agents, lipid mediators, and other cytokines thought to contribute to the observed tissue damage, remodeling, and hyper-responsiveness.

[0088] As used herein, the term “tolerance,” “anergy,” or “antigen (allergen)-specific tolerance” refers to a reduction, loss, inhibition, suppression or decrease, of T cells to T cell receptor-mediated stimulation by an allergen or antigen (e.g., a Cockroach allergen such as a protein or peptide of Cockroach enolase, Hsp60, RACK1, TP1, trypsin, vitellogenin, Bla g 1, Bla g 1.0101, Bla g 2, Bla g 4, Bla g 5, Bla g 6, Bla g 6.0101, Bla g 6.0201, Bla g 7, Bla g 9, Bla g 11, NBGA1, NBGA2, NBGA3, NBGA4, NBGA5, NBGA6, NBGA7, NBGA8, NBGA9, NBGA10, NBGA11, NBGA12, NBGA13, NBGA14, NBGA15, or NBGA16, or a Cockroach protein or peptide set forth in any of Tables 5-8). The reduction can lead to reduced or non-responsiveness (insensitivity) of T cells to an allergen or antigen. Such insensitivity is generally antigen-specific and persists after exposure to the antigenic peptide has ceased. For example, tolerance in T cells is characterized by lack of lymphokine/cytokine production, e.g., IL-2, IFN-γ, or TNF-β. T-cell anergy occurs when T cells are exposed to antigen or allergen and receive a first signal (a T cell receptor or CD-3 mediated signal) in the absence of a second signal (a costimulatory signal). Under these conditions, re-exposure of the cells to the same antigen or allergen (even if re-exposure occurs in the presence of a costimulatory molecule) results in failure to produce cytokines and subsequently failure of T cells to proliferate. Thus, a failure to produce lymphokines/cytokines prevents proliferation. Tolerized T cells can, however, proliferate if cultured with cytokines (e.g., IL-2). For example, T cell anergy can also be observed by the lack of IL-2 production by T lymphocytes as measured by ELISA or by a proliferation assay using an indicator cell line.

[0089] As used herein, the term “immunological tolerance” refers to a) a decreased or reduced level of a specific immunological response (thought to be mediated at least in part by antigen-specific effector T lymphocytes, B lymphocytes, antibody or a combination); b) a delay in the onset or progression of a specific immunological response; or c) a reduced risk of the onset or progression of a specific immunological response to an antigen or allergen (e.g., a Cockroach allergen such as a protein or peptide of Cockroach enolase, Hsp60, RACK1, TP1, trypsin, vitellogenin, Bla g 1, Bla g 1.0101, Bla g 2, Bla g 4, Bla g 5, Bla g 6, Bla g 6.0101, Bla g 6.0201, Bla g 7, Bla g 9, Bla g 11, NBGA1, NBGA2, NBGA3, NBGA4, NBGA5, NBGA6, NBGA7, NBGA8, NBGA9, NBGA10, NBGA11, NBGA12, NBGA13, NBGA14, NBGA15, or NBGA16 or a Cockroach protein or peptide set forth in any of Tables 5-8). “Specific” immunological tolerance occurs when tolerance is preferentially invoked against certain antigens (allergens) in comparison with other antigens (allergens). Tolerance is an active antigen dependent process and differs from non-specific immunosuppression and immunodeficiency.

[0090] An increase, improvement, enhancement or induction of “tolerance” refers to a decrease, reduction, inhibition, suppression, or limiting or controlling or clearing of specific immunological reactivity to an antigen (allergen) as compared to reactivity to the antigen in a previous exposure to the same antigen. Thus in certain embodiments, a method or use of inducing immunological tolerance in a subject to an allergen includes elimination of an allergic response of the subject to the allergen (e.g., a Cockroach allergen such as a protein or peptide of Cockroach enolase, Hsp60, RACK1, TP1, trypsin, vitellogenin, Bla g 1, Bla g 1.0101, Bla g 2, Bla g 4, Bla g 5, Bla g 6, Bla g 6.0101, Bla g 6.0201, Bla g 7, Bla g 9, Bla g 11, NBGA1, NBGA2, NBGA3, NBGA4, NBGA5, NBGA6, NBGA7, NBGA8, NBGA9, NBGA10, NBGA11, NBGA12, NBGA13, NBGA14, NBGA15, or NBGA16, or a Cockroach protein or peptide set forth in any of Tables 5-8). Immunological tolerance in a subject to an allergen can also be reflected by reducing the occurrence, frequency, severity, progression, or duration of an allergic response of the subject to the antigen or allergen (e.g., a Cockroach allergen such as a protein or peptide of Cockroach enolase, Hsp60, RACK1, TP1, trypsin, vitellogenin, Bla g 1, Bla g 1.0101, Bla g 2, Bla g 4, Bla g 5, Bla g 6, Bla g 6.0101, Bla g 6.0201, Bla g 7, Bla g 9, Bla g 11, NBGA1, NBGA2, NBGA3, NBGA4, NBGA5, NBGA6, NBGA7, NBGA8, NBGA9, NBGA10, NBGA11, NBGA12, NBGA13, NBGA14, NBGA15, or NBGA16, or a Cockroach protein or peptide set forth in any of Tables 5-8).

[0091] While desirably tolerance can refer to non-reactivity to an antigen or allergen, tolerance need not be complete non-reactivity and can only be partial, and in any event is reflected by a decrease, inhibition, suppression or reduction in specific immunological reactivity to an antigen or allergen as compared to reactivity to the antigen or allergen in a previous exposure to the same antigen or allergen (or epitope thereof). Thus, in another embodiment, a method or use of inducing immunological tolerance in a subject to an allergen includes stabilizing or maintaining the level of an allergic response in the subject to the allergen (e.g., a Cockroach allergen such as a protein or peptide of Cockroach enolase, Hsp60, RACK1, TP1, trypsin, vitellogenin, Bla g 1, Bla g 1.0101, Bla g 2, Bla g 4, Bla g 5, Bla g 6, Bla g 6.0101, Bla g 6.0201, Bla g 7, Bla g 9, Bla g 11, NBGA1, NBGA2, NBGA3, NBGA4, NBGA5, NBGA6, NBGA7, NBGA8, NBGA9, NBGA10, NBGA11, NBGA12, NBGA13, NBGA14, NBGA15, or NBGA16, or a Cockroach protein or peptide set forth in any of Tables 5-8).

[0092] Induction of immune tolerance (also referred to as desensitization), and the relative amount of immune tolerance, can be measured by methods disclosed herein or known to the skilled artisan. For example, induction of immune tolerance can be measured by modulation of lymphokine and/or cytokine level in said animal. As such, modulation can be an increase of a cytokine level, for instance an increase of a cytokine level at least 1.5, 2, 3 times or more relative to before said induction. Alternatively, modulation can be a decrease of the level of a particular cytokine level, for instance a decrease of the cytokine level is at least 1.5, 2, 3 times or more relative to before said induction. The lymphokines/cytokines chosen to measure can be from any relevant lymphokines/cytokines, such as IL-2, IL-5, IL-4, IL-6, IL-10, IL-12, IL-13, TNF-α, IFN-γ, IFN-α, TGF-β, MCP-1, RANK-L and Flt3L.

[0093] As disclosed herein, peptides and proteins of the invention are useful in methods and uses and medicaments, for example, of “specific” immunotherapy (SIT). The term “specific” immunotherapy refers to a therapy particular or specific for the protein or peptide, e.g., allergen (e.g., a Cockroach allergen such as a protein or peptide of Cockroach enolase, Hsp60, RACK1, TP1, trypsin, vitellogenin, Bla g 1, Bla g 1.0101, Bla g 2, Bla g 4, Bla g 5, Bla g 6, Bla g 6.0101, Bla g 6.0201, Bla g 7, Bla g 9, Bla g 11, NBGA1, NBGA2, NBGA3, NBGA4, NBGA5, NBGA6, NBGA7, NBGA8, NBGA9, NBGA10, NBGA11, NBGA12, NBGA13, NBGA14, NBGA15, or NBGA16, or a Cockroach protein or peptide set forth in any of Tables 5-8). To achieve “specific immunotherapy” an antigen is administered to a subject in order to achieve immunological tolerance of the subject to an antigen, including for example, an allergen (e.g., a Cockroach allergen such as a protein or peptide of Cockroach enolase, Hsp60, RACK1, TP1, trypsin, vitellogenin, Bla g 1, Bla g 1.0101, Bla g 2, Bla g 4, Bla g 5, Bla g 6, Bla g 6.0101, Bla g 6.0201, Bla g 7, Bla g 9, Bla g 11, NBGA1, NBGA2, NBGA3, NBGA4, NBGA5, NBGA6, NBGA7, NBGA8, NBGA9, NBGA10, NBGA11, NBGA12, NBGA13, NBGA14, NBGA15, or NBGA16, or a Cockroach protein or peptide set forth in any of Tables 5-8).

[0094] More particularly, specific immunotherapy may be conducted by administering an antigen derived from the antigen (e.g. allergen) against which immunological tolerance is sought. Alternatively, immunotherapy can be conducted by “non-specific” immunotherapy using a different antigen or protein than the antigen (allergen) against which immunological tolerance is sought. For example as described in US patent application publication US2012/0100164A1, which relates to the treatment of a hypersensitivity immune response, such as allergic rhinitis or asthma, via bystander suppression by use of an antigen unrelated to the allergen triggering the hypersensitivity immune response in an individual to be treated provided that the antigen is obtainable from the source material, e.g. a Cockroach antigen for treatment of an immune response to another Cockroach allergen (e.g. a Cockroach allergen such as a protein or peptide of Cockroach enolase, Hsp60, RACK1, TP1, trypsin, vitellogenin, Bla g 1, Bla g 1.0101, Bla g 2, Bla g 4, Bla g 5, Bla g 6, Bla g 6.0101, Bla g 6.0201, Bla g 7, Bla g 9, Bla g 11, NBGA1, NBGA2, NBGA3, NBGA4, NBGA5, NBGA6, NBGA7, NBGA8, NBGA9, NBGA10, NBGA11, NBGA12, NBGA13, NBGA14, NBGA15, or NBGA16).

[0095] Thus, in different embodiments, the Cockroach antigen administered and antigen (e.g. allergen) against which immunological tolerance is sought may be the same or a different Cockroach protein. In one embodiment, a method or use includes administering to a subject an amount of a Cockroach protein or peptide, or subsequence, portion, homologue, variant or derivative thereof sufficient to elicit, stimulate, induce, promote, increase, enhance or augment immunological tolerance to an allergen (e.g., a Cockroach allergen such as a protein or peptide of Cockroach enolase, Hsp60, RACK1, TP1, trypsin, vitellogenin, Bla g 1, Bla g 1.0101, Bla g 2, Bla g 4, Bla g 5, Bla g 6, Bla g 6.0101, Bla g 6.0201, Bla g 7, Bla g 9, Bla g 11, NBGA1, NBGA2, NBGA3, NBGA4, NBGA5, NBGA6, NBGA7, NBGA8, NBGA9, NBGA10, NBGA11, NBGA12, NBGA13, NBGA14, NBGA15, or NBGA16, or a Cockroach protein or peptide set forth in any of Tables 5-8) in the subject. In one aspect, a Cockroach antigen is administered to a subject during specific immunotherapy to treat the subject for an allergic reaction to the same Cockroach antigen. In a different aspect, a Cockroach antigen is administered to a subject during specific immunotherapy to treat the subject for an allergic reaction to a different Cockroach antigen. In another embodiment, a method includes administering to a subject an amount of a nucleic acid encoding all or a portion (e.g., a T cell epitope) of a Cockroach protein or peptide, or subsequence, portion, homologue, variant or derivative thereof sufficient to elicit, stimulate, induce, promote, increase, enhance or augment immunological tolerance to an allergen (e.g., a Cockroach allergen such as a protein or peptide of Cockroach enolase, Hsp60, RACK1, TP1, trypsin, vitellogenin, Bla g 1, Bla g 1.0101, Bla g 2, Bla g 4, Bla g 5, Bla g 6, Bla g 6.0101, Bla g 6.0201, Bla g 7, Bla g 9, Bla g 11, NBGA1, NBGA2, NBGA3, NBGA4, NBGA5, NBGA6, NBGA7, NBGA8, NBGA9, NBGA10, NBGA11, NBGA12, NBGA13, NBGA14, NBGA15, or NBGA16)) in the subject. In various embodiments, a method or use of specific immunotherapy reduces, inhibits, suppresses or decreases sensitivity or (hyper)sensitivity to the protein or peptide, e.g., allergen, or elicits, stimulates, increases, induces, promotes or improves tolerance of the protein or peptide, e.g., allergen. Typically a subject is administered a protein or peptide, e.g., allergen, for example, via a subcutaneous injection.

[0096] Methods and uses include multi-dose regimens. For example, a method or use can begin with small doses of allergen or protein or peptide (e.g., a Cockroach allergen such as a protein or peptide of Cockroach enolase, Hsp60, RACK1, TP1, trypsin, vitellogenin, Bla g 1, Bla g 1.0101, Bla g 2, Bla g 4, Bla g 5, Bla g 6, Bla g 6.0101, Bla g 6.0201, Bla g 7, Bla g 9, Bla g 11, NBGA1, NBGA2, NBGA3, NBGA4, NBGA5, NBGA6, NBGA7, NBGA8, NBGA9, NBGA10, NBGA11, NBGA12, NBGA13, NBGA14, NBGA15, or NBGA16, or a Cockroach protein or peptide set forth in any of Tables 5-8) and the doses are increased for repeated contact or administration.

[0097] A variant or derivative of an antigen (e.g., a Cockroach allergen such as a protein or peptide of Cockroach enolase, Hsp60, RACK1, TP1, trypsin, vitellogenin, Bla g 1, Bla g 1.0101, Bla g 2, Bla g 4, Bla g 5, Bla g 6, Bla g 6.0101, Bla g 6.0201, Bla g 7, Bla g 9, Bla g 11, NBGA1, NBGA2, NBGA3, NBGA4, NBGA5, NBGA6, NBGA7, NBGA8, NBGA9, NBGA10, NBGA11, NBGA12, NBGA13, NBGA14, NBGA15, or NBGA16, or a Cockroach protein or peptide set forth in any of Tables 5-8), including an allergen as described herein, or a subsequence or portion of an antigen or allergen, include molecules that are structurally similar and functionally similar (e.g, of all or a part of an amino acid sequence in any of Tables 5-8). A variant, derivative or subsequence of antigen or allergen is functionally similar to the antigen or allergen sequence if the variant, derivative or subsequence is capable of eliciting a detectable or measurable immune response, even if it is a reduced immune response compared to the nonvariant/non-derived or native sequence, which may be determined using methods, including animal models and in vitro assays, described herein and know to one of skill in the art. For example, an immune response may be determined by quantitative and/or qualitative determination of lymphokine/cytokine production (e.g., by T cells), antibody production (including class and/or isotype), cellular mobilization, migration or motility, and optionally in vivo, such as an animal model of antigen/allergen immune responsiveness. An immune response of variant, derivative or subsequence of antigen or allergen compared to the non-variant/non-derivatized/native full length antigen or allergen may be ascertained by analysis of a particular measure (such as lymphokine/cytokine production, immunoglobulin production, cell mobilization, migration, motility, etc.) and may be greater, less than or comparable, e.g., within 5%, 10%, 15%, or 20% or 25% of the immune response of non-variant/non-derivatized/native full length antigen or allergen. For example, levels of Th1 lymphokines/cytokines, such as IFN-γ IL-2, and TNF-β and Th2 cytokines, such as IL-4, IL-5, IL-9, IL-10, and IL-13, may be determined according to methods described herein or known to one of skill in the art.

[0098] As disclosed herein, proteins and peptides, or a subsequence, portion, homologue, variant or derivative thereof include those having all or at least partial sequence identity to one or more exemplary proteins and peptides, or a subsequence, portion, homologue, variant or derivative thereof (e.g., a Cockroach allergen such as a protein or peptide of Cockroach enolase, Hsp60, RACK1, TP1, trypsin, vitellogenin, Bla g 1, Bla g 1.0101, Bla g 2, Bla g 4, Bla g 5, Bla g 6, Bla g 6.0101, Bla g 6.0201, Bla g 7, Bla g 9, Bla g 11, NBGA1, NBGA2, NBGA3, NBGA4, NBGA5, NBGA6, NBGA7, NBGA8, NBGA9, NBGA10, NBGA11, NBGA12, NBGA13, NBGA14, NBGA15, or NBGA16, or a Cockroach protein or peptide set forth in any of Tables 5-8). The term “identity” and “identical” and grammatical variations thereof, mean that two or more referenced entities are the same (e.g., peptides or polynucleotide molecules). Thus, where two proteins, peptides, subsequences, portions, homologues, variants or derivatives thereof are identical, they have the same amino acid sequence. The identity can be over a defined area (region or domain) of the sequence. “Areas, regions or domains” of homology or identity mean that a portion of two or more referenced entities share homology or are the same.

[0099] Identity can be determined by comparing each position in aligned sequences. A degree of identity between amino acid sequences is a function of the number of identical or matching amino acids at positions shared by the sequences, i.e. over a specified region. Optimal alignment of sequences for comparisons of identity may be conducted using a variety of algorithms, as are known in the art, including the ClustalW program, available at http://clustalw.genome.ad.jp, the local homology algorithm of Smith and Waterman, 1981, Adv. Appl. Math 2: 482, the homology alignment algorithm of Needleman and Wunsch, 1970, J. Mol. Biol. 48:443, the search for similarity method of Pearson and Lipman, 1988, Proc. Natl. Acad. Sci. USA 85: 2444, and the computerized implementations of these algorithms (such as GAP, BESTFIT, FASTA and TFASTA in the Wisconsin Genetics Software Package, Genetics Computer Group, Madison, Wis., U.S.A.). Sequence identity may also be determined using the BLAST algorithm, described in Altschul et al., 1990, J. Mol. Biol. 215:403-10 (using the published default settings). Software for performing BLAST analysis may be available through the National Center for Biotechnology Information (through the internet at http://www.ncbi.nlm.nih.gov/). Such algorithms that calculate percent sequence identity (homology) generally account for sequence gaps and mismatches over the comparison region or area. For example, a BLAST (e.g., BLAST 2.0) search algorithm (see, e.g., Altschul et al., J. Mol. Biol. 215:403 (1990), publicly available through NCBI) has exemplary search parameters as follows: Mismatch −2; gap open 5; gap extension 2. For polypeptide sequence comparisons, a BLASTP algorithm is typically used in combination with a scoring matrix, such as PAM100, PAM 250, BLOSUM 62 or BLOSUM 50. FASTA (e.g., FASTA2 and FASTA3) and SSEARCH sequence comparison programs are also used to quantitate the extent of identity (Pearson et al., Proc. Natl. Acad. Sci. USA 85:2444 (1988); Pearson, Methods Mol Biol. 132:185 (2000); and Smith et al., J. Mol. Biol. 147:195 (1981)). Programs for quantitating protein structural similarity using Delaunay-based topological mapping have also been developed (Bostick et al., Biochem Biophys Res Commun. 304:320 (2003)).

[0100] As described herein, Cockroach proteins and peptides include homologues of Cockroach proteins and peptides (e.g., of all or a part of any amino acid sequence of any protein or peptide in any of Tables 5-8). A polypeptide sequence or polynucleotide sequence is a “homologue” of, or is “homologous” to, another sequence if the two sequences have substantial identity over a specified region and a functional activity of the sequences is preserved or conserved, at least in part (as used herein, the term ‘homologous’ does not infer nor exclude evolutionary relatedness).

[0101] Accordingly, in particular embodiments, methods and uses and medicaments of the invention include homologues of peptides and proteins from non-Cockroach allergens, including for example other antigens and allergens, such as non-Cockroach proteins and peptides considered to be homologues as set forth herein (e.g., a Cockroach allergen such as a protein or peptide of Cockroach enolase, Hsp60, RACK1, TP1, trypsin, vitellogenin, Bla g 1, Bla g 1.0101, Bla g 2, Bla g 4, Bla g 5, Bla g 6, Bla g 6.0101, Bla g 6.0201, Bla g 7, Bla g 9, Bla g 11, NBGA1, NBGA2, NBGA3, NBGA4, NBGA5, NBGA6, NBGA7, NBGA8, NBGA9, NBGA10, NBGA11, NBGA12, NBGA13, NBGA14, NBGA15, or NBGA16, or a Cockroach protein or peptide set forth in any of Tables 5-8). Thus, as a non-limiting example, peptide and protein homologues from non-Cockroach antigens or allergens may be administered or used to modulate immune activity or immune response against a Cockroach allergen or antigen or to treat an allergic reaction, allergic response, allergic disorder or allergic disease associated with a Cockroach allergen or antigen. As another non-limiting example, peptide and protein homologues from non-Cockroach antigens or allergens may be administered or used to modulate immune activity or immune response against a non-Cockroach allergen or antigen or to treat an allergic reaction, allergic response, allergic disorder or allergic disease associated with a non-Cockroach allergen or antigen.

[0102] Two polypeptide sequences or polynucleotide sequences are considered to be substantially identical if, when optimally aligned (with gaps permitted), they share at least about 40% sequence identity or greater (e.g. 45%, 50%, 55%, 60%, 65%, 70%, 75%, 80%, 85%, 90%, 95%, 96%, 97%, 98%, 99%, etc. identify over a specific region), for example, over all or a part of any Cockroach allergen such as a protein or peptide of Cockroach enolase, Hsp60, RACK1, TP1, trypsin, vitellogenin, Bla g 1, Bla g 1.0101, Bla g 2, Bla g 4, Bla g 5, Bla g 6, Bla g 6.0101, Bla g 6.0201, Bla g 7, Bla g 9, Bla g 11, NBGA1, NBGA2, NBGA3, NBGA4, NBGA5, NBGA6, NBGA7, NBGA8, NBGA9, NBGA10, NBGA11, NBGA12, NBGA13, NBGA14, NBGA15, or NBGA16, or a Cockroach protein or peptide set forth in any of Tables 5-8, or if the sequences share defined functional motifs (e.g., epitopes). The percent identity can extend over the entire sequence length or a portion of the sequence (e.g., over all or a part of any amino acid sequence in any protein or peptide set forth in any of Tables 5-8. In particular aspects, the length of the sequence sharing the percent identity is 2, 3, 4, 5 or more contiguous amino acids, e.g., 6, 7, 8, 9, 10, 11, 12, 13, 14, 15, 16, 17, 18, 19, 20, etc. contiguous amino acids (e.g., over all or a part of any amino acid sequence in any protein or peptide set forth in any of Tables 5-8). In additional particular aspects, the length of the sequence sharing the percent identity is 20 or more contiguous amino acids, e.g., 21, 22, 23, 24, 25, 26, 27, 28, 29, 30, 31, 32, 33, 34, 35, etc. contiguous amino acids (e.g., over all or a part of any amino acid sequence in any Cockroach protein or peptide set forth in any of Tables 5-8). In further particular aspects, the length of the sequence sharing the percent identity is 35 or more contiguous amino acids, e.g., 36, 37, 38, 39, 40, 41, 42, 43, 44, 45, 45, 47, 48, 49, 50, etc., contiguous amino acids (e.g., over all or a part of any amino acid sequence in any Cockroach protein or peptide set forth in any of Tables 5-8). In yet further particular aspects, the length of the sequence sharing the percent identity is 50 or more contiguous amino acids, e.g., 50-55, 55-60, 60-65, 65-70, 70-75, 75-80, 80-85, 85-90, 90-95, 95-100, etc. contiguous amino acids (e.g., over all or a part of any amino acid sequence in any Cockroach protein or peptide set forth in any of Tables 5-8).

[0103] An “unrelated” or “non-homologous” sequence shares less than 30% identity. More particularly, shares less than about 25% identity, with a protein, peptide or polynucleotide of the invention over a specified region of homology.

[0104] A variant or derivative of a protein or peptide refers to a modified or variant form of the protein or peptide, or subsequence, portion or homologue thereof (e.g., over all or a part of any Cockroach allergen such as a protein or peptide of Cockroach enolase, Hsp60, RACK1, TP1, trypsin, vitellogenin, Bla g 1, Bla g 1.0101, Bla g 2, Bla g 4, Bla g 5, Bla g 6, Bla g 6.0101, Bla g 6.0201, Bla g 7, Bla g 9, Bla g 11, NBGA1, NBGA2, NBGA3, NBGA4, NBGA5, NBGA6, NBGA7, NBGA8, NBGA9, NBGA10, NBGA11, NBGA12, NBGA13, NBGA14, NBGA15, or NBGA16, or a Cockroach protein or peptide set forth in any of Tables 5-8). Such modified forms, such as amino acid deletions, additions and substitutions, of the proteins and peptides can also be used in the invention uses, methods and compositions, including methods for modulating an immune response, eliciting, stimulating, inducing, promoting, increasing, or enhancing immunological tolerance and protecting and treating subjects against an allergic reaction or response, as set forth herein.

[0105] Thus, in accordance with the invention, modified, variant and derivative forms of proteins and peptides, subsequences, portions, and homologues thereof (e.g., of a Cockroach allergen such as a protein or peptide of Cockroach enolase, Hsp60, RACK1, TP1, trypsin, vitellogenin, Bla g 1, Bla g 1.0101, Bla g 2, Bla g 4, Bla g 5, Bla g 6, Bla g 6.0101, Bla g 6.0201, Bla g 7, Bla g 9, Bla g 11, NBGA1, NBGA2, NBGA3, NBGA4, NBGA5, NBGA6, NBGA7, NBGA8, NBGA9, NBGA10, NBGA11, NBGA12, NBGA13, NBGA14, NBGA15, or NBGA16, or a Cockroach protein or peptide set forth in any of Tables 5-8) are provided that have one or more functions or activities of unmodified, non-variant and non-derivatized forms of proteins and peptides. Such forms, referred to as “modifications”, “variants” or “derivatives” and grammatical variations thereof deviate from a reference sequence. For example, as described herein, a protein, peptide, subsequence, portion, or homologue thereof may comprise, consist or consist essentially of an amino acid sequence that is a modification, variant, or derivative of a Cockroach allergen such as a protein or peptide of Cockroach enolase, Hsp60, RACK1, TP1, trypsin, vitellogenin, Bla g 1, Bla g 1.0101, Bla g 2, Bla g 4, Bla g 5, Bla g 6, Bla g 6.0101, Bla g 6.0201, Bla g 7, Bla g 9, Bla g 11, NBGA1, NBGA2, NBGA3, NBGA4, NBGA5, NBGA6, NBGA7, NBGA8, NBGA9, NBGA10, NBGA11, NBGA12, NBGA13, NBGA14, NBGA15, or NBGA16, or a Cockroach protein or peptide set forth in any of Tables 5-8. Such modifications, variants, or derivatives may have greater or less activity or function than a reference protein or peptide, such as ability to elicit, stimulate, induce, promote, increase, enhance, activate, modulate, inhibit, decreases, suppress, or reduce an immune response (e.g. a T cell response) or elicit, stimulate, induce, promote, increase or enhance immunological tolerance (desensitize) to an antigen or allergen. Thus, proteins, peptides, or subsequences, portions or homologues thereof include sequences having substantially the same, greater or less relative activity or function as a reference antigen or allergen (e.g., any Cockroach allergen such as a protein or peptide of Cockroach enolase, Hsp60, RACK1, TP1, trypsin, vitellogenin, Bla g 1, Bla g 1.0101, Bla g 2, Bla g 4, Bla g 5, Bla g 6, Bla g 6.0101, Bla g 6.0201, Bla g 7, Bla g 9, Bla g 11, NBGA1, NBGA2, NBGA3, NBGA4, NBGA5, NBGA6, NBGA7, NBGA8, NBGA9, NBGA10, NBGA11, NBGA12, NBGA13, NBGA14, NBGA15, or NBGA16, or a Cockroach protein or peptide set forth in any of Tables 5-8) for example, an ability to elicit, stimulate, induce, promote, increase, enhance, activate, modulate, inhibit, suppress, decrease or reduce an immune response (e.g. a T cell response) or elicit, stimulate, induce, promote, increase or enhance immunological tolerance to an antigen or allergen in vitro or in vivo.

[0106] A variant or derivative therefore includes deletions, including truncations and fragments; insertions and additions, including tagged polypeptides and fusion proteins; substitutions, for example conservative substitutions, site-directed mutants and allelic variants; and modifications, including peptoids having one or more non-amino acyl groups (q.v., sugar, lipid, etc.) covalently linked to the peptide and post-translational modifications.

[0107] Non-limiting examples of modifications include one or more amino acid substitutions (e.g., 1, 2, 3, 4, 5, 6, 7, 8, 9, 10, 11, 12, 13, 14, 15, 16, 17, 18, 19, 20, 20-25, 25-30, 30-50, 50-100, or more residues), additions and insertions (e.g., 1, 2, 3, 4, 5, 6, 7, 8, 9, 10, 11, 12, 13, 14, 15, 16, 17, 18, 19, 20, 20-25, 25-30, 30-50, 50-100, or more residues) and deletions (e.g., 1, 2, 3, 4, 5, 6, 7, 8, 9, 10, 11, 12, 13, 14, 15, 16, 17, 18, 19, 20, 20-25, 25-30, 30-50, 50-100) of a reference protein, peptide, or subsequence or portion thereof (e.g., over all or a part of any amino acid sequence in any protein or peptide of Cockroach enolase, Hsp60, RACK1, TP1, trypsin, vitellogenin, Bla g 1, Bla g 1.0101, Bla g 2, Bla g 4, Bla g 5, Bla g 6, Bla g 6.0101, Bla g 6.0201, Bla g 7, Bla g 9, Bla g 11, NBGA1, NBGA2, NBGA3, NBGA4, NBGA5, NBGA6, NBGA7, NBGA8, NBGA9, NBGA10, NBGA11, NBGA12, NBGA13, NBGA14, NBGA15, or NBGA16, or a Cockroach protein or peptide set forth in any of Tables 5-8). In particular embodiments, a modified or variant sequence retains at least part of a function or an activity of unmodified sequence, and can have less than, comparable, or greater, but at least a part of, a function or activity of a reference sequence, for example, the ability elicit, stimulate, induce, promote, increase, enhance, activate, modulate, inhibit, suppress, decrease, or reduce an immune response (e.g. a T cell response) or elicit, stimulate, induce, promote, increase or enhance immunological tolerance to an allergen. Such immune responses include, for example, among others, induced, increased, enhanced, stimulated, activated, modulated, inhibited, suppressed, decreased or reduced expression, production or activity of a cytokine (e.g., IL-5, etc.), an antibody (e.g. increase production of IgG antibodies, decrease production of IgE) or an immune cell (e.g. CD4+ T cell, CD8+ T cell, Th1 cell, Th2 cell or regulatory T cell).

[0108] Variants and derivatives of proteins and peptides include naturally-occurring polymorphisms or allelic variants, strain variants, as well as synthetic proteins and peptides that contain a limited number of conservative amino acid substitutions of the amino acid sequence. A variety of criteria can be used to indicate whether amino acids at a particular position in a protein or peptide are similar. In making such changes, substitutions of like amino acid residues can be made on the basis of relative similarity of side-chain substituents, for example, their size, charge, hydrophobicity, hydrophilicity, and the like, and such substitutions may be assayed for their effect on the function of the peptide by routine testing.

[0109] Specific non-limiting examples of substitutions include conservative and non-conservative amino acid substitutions. A “conservative substitution” is the replacement of one amino acid by a biologically, chemically or structurally similar residue. Biologically similar means that the substitution does not destroy a biological activity. Structurally similar means that the amino acids have side chains with similar length, such as alanine, glycine and serine, or a similar size. Chemical similarity means that the residues have the same charge, or are both hydrophilic or hydrophobic. For example, a conservative amino acid substitution is one in which an amino acid residue is replaced with an amino acid residue having a similar side chain, which include amino acids with basic side chains (e.g., lysine, arginine, histidine); acidic side chains (e.g., aspartic acid, glutamic acid); uncharged polar side chains (e.g., glycine, asparagine, glutamine, serine, threonine, tyrosine, cysteine, histidine); nonpolar side chains (e.g., alanine, valine, leucine, isoleucine, proline, phenylalanine, methionine, tryptophan); beta-branched side chains (e.g., threonine, valine, isoleucine), and aromatic side chains (e.g., tyrosine, phenylalanine, tryptophan). Particular examples include the substitution of one hydrophobic residue, such as isoleucine, valine, leucine or methionine for another, or the substitution of one polar residue for another, such as the substitution of arginine for lysine, glutamic for aspartic acids, or glutamine for asparagine, serine for threonine, and the like. Proline, which is considered more difficult to classify, shares properties with amino acids that have aliphatic side chains (e.g., Leu, Val, Ile, and Ala). In certain circumstances, substitution of glutamine for glutamic acid or asparagine for aspartic acid may be considered a similar substitution in that glutamine and asparagine are amide derivatives of glutamic acid and aspartic acid, respectively. Conservative changes can also include the substitution of a chemically derivatized moiety for a non-derivatized residue, for example, by reaction of a functional side group of an amino acid. Variants and derivatives of proteins and peptides include forms having a limited number of one or more substituted residues.

[0110] An addition can be a covalent or non-covalent attachment of any type of molecule. Specific examples of additions include glycosylation, acetylation, phosphorylation, amidation, formylation, ubiquitination, and derivatization by protecting/blocking groups and any of numerous chemical modifications. Additional specific non-limiting examples of an addition are one or more additional amino acid residues. Accordingly, proteins, peptides, subsequences, portions, homologues, variants or derivatives thereof, can be a part of or contained within a larger molecule, such as another protein or peptide sequence, such as a fusion or chimera with a different (distinct) sequence.

[0111] In particular embodiments, an addition is a fusion (chimeric) sequence, an amino acid sequence having one or more molecules not normally present in a reference native (wild type) sequence covalently attached to the sequence. The term “chimeric” and grammatical variations thereof, when used in reference to a sequence, means that the sequence contains one or more portions that are derived from, obtained or isolated from, or based upon other physical or chemical entities. For example, a chimera of two or more different proteins may have one part a protein, peptide, subsequence, portion, homologue or variant thereof, and a second part of the chimera may be from a different sequence, or unrelated protein sequence.

[0112] Another particular example of a sequence having an amino acid addition is one in which a second heterologous sequence, i.e., heterologous functional domain is attached (covalent or non-covalent binding) that confers a distinct or complementary function. Heterologous functional domains are not restricted to amino acid residues. Thus, a heterologous functional domain can consist of any of a variety of different types of small or large functional moieties. Such moieties include nucleic acid, peptide, carbohydrate, lipid or small organic compounds, such as a drug (e.g., an antiviral), a metal (gold, silver), and radioisotope. For example, a tag such as T7 or polyhistidine can be attached in order to facilitate purification or detection of a protein, peptide, etc. Accordingly, there are provided proteins, peptides, subsequences, portions and homologues thereof (e.g., a Cockroach allergen such as a protein or peptide of Cockroach enolase, Hsp60, RACK1, TP1, trypsin, vitellogenin, Bla g 1, Bla g 1.0101, Bla g 2, Bla g 4, Bla g 5, Bla g 6, Bla g 6.0101, Bla g 6.0201, Bla g 7, Bla g 9, Bla g 11, NBGA1, NBGA2, NBGA3, NBGA4, NBGA5, NBGA6, NBGA7, NBGA8, NBGA9, NBGA10, NBGA11, NBGA12, NBGA13, NBGA14, NBGA15, or NBGA16, or a Cockroach protein or set forth in any of Tables 5-8), and a heterologous domain, wherein the heterologous functional domain confers a distinct function on the protein, peptide, subsequence, portion or homologue thereof.

[0113] Linkers, such as amino acid or peptidomimetic sequences may be inserted between the sequence and the addition (e.g., heterologous functional domain) so that the two entities maintain, at least in part, a distinct function or activity. Linkers may have one or more properties that include a flexible conformation, an inability to form an ordered secondary structure or a hydrophobic or charged character, which could promote or interact with either domain. Amino acids typically found in flexible protein regions include Gly, Asn and Ser. Other near neutral amino acids, such as Thr and Ala, may also be used in the linker sequence. The length of the linker sequence may vary without significantly affecting a function or activity of the fusion protein (see, e.g., U.S. Pat. No. 6,087,329). Linkers further include chemical moieties and conjugating agents, such as sulfo-succinimidyl derivatives (sulfo-SMCC, sulfo-SMPB), disuccinimidyl suberate (DSS), disuccinimidyl glutarate (DSG) and disuccinimidyl tartrate (DST).

[0114] Further non-limiting examples of additions are detectable labels. Thus, in another embodiment, the invention provides proteins, peptides, subsequences, portions and homologues thereof, that are detectably labeled. Specific examples of detectable labels include fluorophores, chromophores, radioactive isotopes (e.g., S³⁵, P³², I¹²⁵), electron-dense reagents, enzymes, ligands and receptors. Enzymes are typically detected by their activity. For example, horseradish peroxidase is usually detected by its ability to convert a substrate such as 3,3-′,5,5-′-tetramethylbenzidine (TMB) to a blue pigment, which can be quantified.

[0115] Another non-limiting example of an addition is an insertion of an amino acid within any protein, peptide, subsequence, portion or homologue thereof (e.g., any protein or sequence set forth herein, such as a protein or peptide of Cockroach enolase, Hsp60, RACK1, TP1, trypsin, vitellogenin, Bla g 1, Bla g 1.0101, Bla g 2, Bla g 4, Bla g 5, Bla g 6, Bla g 6.0101, Bla g 6.0201, Bla g 7, Bla g 9, Bla g 11, NBGA1, NBGA2, NBGA3, NBGA4, NBGA5, NBGA6, NBGA7, NBGA8, NBGA9, NBGA10, NBGA11, NBGA12, NBGA13, NBGA14, NBGA15, or NBGA16, or a Cockroach protein or peptide set forth in any of Tables 5-8). In particular embodiments, an insertion is of one or more amino acid residues inserted into the amino acid sequence of a protein or peptide, or subsequence, portion or homologue thereof, such as any Cockroach protein or peptide, such as Cockroach enolase, Hsp60, RACK1, TP1, trypsin, vitellogenin, Bla g 1, Bla g 1.0101, Bla g 2, Bla g 4, Bla g 5, Bla g 6, Bla g 6.0101, Bla g 6.0201, Bla g 7, Bla g 9, Bla g 11, NBGA1, NBGA2, NBGA3, NBGA4, NBGA5, NBGA6, NBGA7, NBGA8, NBGA9, NBGA10, NBGA11, NBGA12, NBGA13, NBGA14, NBGA15, or NBGA16, or a Cockroach protein or peptide set forth in any of Tables 5-8.

[0116] Modified and variant proteins, peptides, subsequences, portions or homologues thereof also include one or more D-amino acids substituted for L-amino acids (and mixtures thereof), structural and functional analogues, for example, peptidomimetics having synthetic or non-natural amino acids or amino acid analogues and derivatized forms. Modifications include cyclic structures such as an end-to-end amide bond between the amino and carboxy-terminus of the molecule or intra- or inter-molecular disulfide bond. Proteins, peptides, subsequences, portions and homologues thereof may be modified in vitro or in vivo, e.g., post-translationally modified to include, for example, sugar residues, phosphate groups, ubiquitin, fatty acids, lipids, etc.

[0117] Specific non-limiting examples of modified and variant proteins, peptides, subsequences, portions and homologues thereof include proteins or peptides comprising, consisting or consisting essentially of an amino acid sequence comprising at least one amino acid deletion from a full length Cockroach protein or amino acid sequence such as a protein or peptide of Cockroach enolase, Hsp60, RACK1, TP1, trypsin, vitellogenin, Bla g 1, Bla g 1.0101, Bla g 2, Bla g 4, Bla g 5, Bla g 6, Bla g 6.0101, Bla g 6.0201, Bla g 7, Bla g 9, Bla g 11, NBGA1, NBGA2, NBGA3, NBGA4, NBGA5, NBGA6, NBGA7, NBGA8, NBGA9, NBGA10, NBGA11, NBGA12, NBGA13, NBGA14, NBGA15, or NBGA16, or a Cockroach protein or peptide set forth in any of Tables 5-8. In particular embodiments, a protein, peptide, or subsequence, portion or homologue thereof is from about 2 to up to one amino acid less than the full length protein sequence. In additional particular embodiments, a protein subsequence or portion is from about 2 to 5, 5 to 10, 10 to 15, 15 to 20, 20 to 25, 25 to 50, 50 to 100 amino acids in length, provided that said subsequence or portion is at least one amino acid less in length than the full-length protein sequence.

[0118] The term “subsequence” or “portion” means a fragment or part of the full length molecule. A subsequence or portion therefore consists of one or more amino acids less than the full length protein or peptide. A subsequence or portion can have one or more amino acids less than the full length protein or peptide internally or terminal amino acid deletions from either amino or carboxy-termini. Subsequences and portions can vary in size. For example, a subsequence or portion of a protein or peptide can be as small as an epitope capable of binding an antibody (i.e., about five amino acids) up to a polypeptide that is one amino acid less than the entire length of a reference protein or peptide.

[0119] As used herein, subsequences and portions may also include or consist of one or more amino acid additions or deletions, wherein the subsequence or portion does not comprise the full length native/wild type protein or peptide sequence. Accordingly, total subsequence or portion lengths can be greater than the length of the full length native/wild type protein or peptide, for example, where a protein or peptide subsequence is fused or forms a chimera with another polypeptide.

[0120] The invention provides isolated and/or purified proteins, peptides, subsequences, portions, homologues, variants or derivatives thereof. In particular embodiments, isolated and/or purified proteins, peptides, subsequences, portions, homologues, variants or derivatives thereof, comprise, consist of or consist essentially of an amino acid sequence of a Cockroach protein or sequence set forth herein. In particular embodiments, the isolated and/or purified proteins, peptides, subsequences, portions, homologues, variants or derivatives thereof include a T cell epitope (e.g., Th2 cell epitope).

[0121] The term “isolated,” when used as a modifier of a composition, means that the compositions are made by the hand of man or are separated, completely or at least in part, from their naturally occurring in vivo environment. Generally, isolated compositions are substantially free of one or more materials with which they normally associate with in nature, for example, one or more protein, nucleic acid, lipid, carbohydrate, cell membrane. The term “isolated” does not exclude alternative physical forms of the composition, such as fusions/chimeras, multimers/oligomers, modifications (e.g., phosphorylation, glycosylation, lipidation) or derivatized forms, or forms expressed in host cells produced by the hand of man.

[0122] An “isolated” composition (e.g., proteins, peptides, subsequences, portions, homologues, variants or derivatives thereof, for example, of any Cockroach protein or sequence set forth herein, or a Cockroach protein or peptide set forth in any of Tables 5-8 can also be “substantially pure” or “purified” when free of most or all of the materials with which it typically associates with in nature. Thus, an isolated protein, peptide, subsequence, portion, homologue, variant or derivative thereof, that also is substantially pure or purified does not include polypeptides or polynucleotides present among millions of other sequences, such as peptides of an peptide library or nucleic acids in a genomic or cDNA library, for example.

[0123] A “substantially pure” or “purified” composition can be combined with one or more other molecules. Thus, “substantially pure” or “purified” does not exclude combinations of compositions, such as combinations of proteins, peptides, subsequences, portions, homologues, variants or derivatives thereof (e.g., multiple proteins, peptides, subsequences, etc.), and other antigens, agents, drugs or therapies.

[0124] Proteins and peptide (e.g., antigens and allergens) can be prepared recombinantly, chemically synthesized, isolated from a biological material or source, and optionally modified, or any combination thereof. A biological material or source would include an organism that produced or possessed any proteins or peptide (e.g., antigen or allergen) set forth herein (e.g., a Cockroach allergen such as a protein or peptide of Cockroach enolase, Hsp60, RACK1, TP1, trypsin, vitellogenin, Bla g 1, Bla g 1.0101, Bla g 2, Bla g 4, Bla g 5, Bla g 6, Bla g 6.0101, Bla g 6.0201, Bla g 7, Bla g 9, Bla g 11, NBGA1, NBGA2, NBGA3, NBGA4, NBGA5, NBGA6, NBGA7, NBGA8, NBGA5, NBGA10, NBGA11, NBGA12, NBGA13, NBGA14, NBGA15, or NBGA16, or a Cockroach protein or peptide set forth in any of Tables 5-8). A biological material or source may further refer to a preparation in which the morphological integrity or physical state has been altered, modified or disrupted, for example, by dissection, dissociation, solubilization, fractionation, homogenization, biochemical or chemical extraction, pulverization, lyophilization, sonication or any other means of manipulating or processing a biological source or material. Subsequences, variants, homologues and derivatives can be prepared, for example, by substituting, deleting or adding one or more amino acid residues in the amino acid sequence of a protein, peptide, subsequence, portion or homologue thereof, and screening for biological activity, for example eliciting an immune response. A skilled person will understand how to make such derivatives or variants, using standard molecular biology techniques and methods, described for example in Sambrook et al. (2001) Molecular Cloning: a Laboratory Manual, 3^{rd} ed., Cold Spring Harbour Laboratory Press).

[0125] The invention also provides protein or peptide (e.g., proteins, peptides, a Cockroach allergen such as a protein or peptide of Cockroach enolase, Hsp60, RACK1, TP1, trypsin, vitellogenin, Bla g 1, Bla g 1.0101, Bla g 2, Bla g 4, Bla g 5, Bla g 6, Bla g 6.0101, Bla g 6.0201, Bla g 7, Bla g 9, Bla g 11, NBGA1, NBGA2, NBGA3, NBGA4, NBGA5, NBGA6, NBGA7, NBGA8, NBGA9, NBGA10, NBGA11, NBGA12, NBGA13, NBGA14, NBGA15, or NBGA16, or a Cockroach protein or peptide set forth in any of Tables 5-8), immobilized on or attached to a substrate. The protein or peptide may comprise proteins, peptides, subsequences, portions, homologues, variants or derivatives thereof, for example, of any Cockroach allergen such as a protein or peptide of Cockroach enolase, Hsp60, RACK1, TP1, trypsin, vitellogenin, Bla g 1, Bla g 1.0101, Bla g 2, Bla g 4, Bla g 5, Bla g 6, Bla g 6.0101, Bla g 6.0201, Bla g 7, Bla g 9, Bla g 11, NBGA1, NBGA2, NBGA3, NBGA4, NBGA5, NBGA6, NBGA7, NBGA8, NBGA9, NBGA10, NBGA11, NBGA12, NBGA13, NBGA14, NBGA15, or NBGA16, or any Cockroach protein or peptide set forth in any of Tables 5-8 can optionally have a unique or distinct position or address on the substrate.

[0126] Substrates to which protein or peptide (e.g., proteins, peptides, subsequences, portions, homologues, variants or derivatives thereof, for example, of any Cockroach allergen such as a protein or peptide of Bla g 1, Bla g 1.0101, Bla g 2, Bla g 4, Bla g 5, Bla g 6, Bla g 6.0101, Bla g 6.0201, Bla g 7, or a Cockroach protein or peptide set forth in any of Tables 5-8 or subsequences, portions, homologues, variants or derivatives thereof, can be immobilized or attached include essentially any physical entity such as a two dimensional surface that is permeable, semi-permeable or impermeable, either rigid or pliable and capable of either storing, binding to or having attached thereto or impregnated.

[0127] Substrates include dry solid medium (e.g., cellulose, polyester, nylon, or mixtures thereof etc.), such as glass, silica, plastic, polyethylene, polystyrene, polypropylene, polyacetate, polycarbonate, polyimide, polyester, polyurethane, or polyvinylchloride. Substrates include structures having sections, compartments, wells, containers, vessels or tubes, separated from each other to avoid or prevent cross-contamination or mixing with each other or with other reagents. Multi-well plates, which typically contain 6, 12, 26, 48, 96, to 1000 wells, are one particular non-limiting example of such a structure.

[0128] Substrates also include supports used for two- or three-dimensional arrays of sequences. The sequences are typically attached to the surface of the substrate (e.g., via a covalent bond) at defined positions (locations or addresses). Substrates can include a number of sequences, for example, 1, 2, 3, 4, 5, 5 to 10, 10 to 15, 15 to 20, 20 to 25, 25 to 30, 30 to 35, 35 to 40, 40 to 45, 45 to 50, 50 to 75, 75 to 100, 100 to 150, 150 to 200, 200 to 250, 250 to 300, up to all proteins, peptides, subsequences, portions, homologues, variants or derivatives thereof, such as a Cockroach protein or peptide set forth in any of Tables 5-8. Such substrates, also referred to as “arrays,” can have any protein density; the greater the density the greater the number of sequences that can be screened on a given chip. Substrates that include a two- or three-dimensional array of sequences, and individual protein sequences therein, may be coded in accordance with the invention.

[0129] The invention also provides nucleic acids encoding proteins, peptides, subsequences, portions, homologues, variants or derivatives thereof, for example, of a Cockroach allergen, such as a protein or peptide of Bla g 1, Bla g 1.0101, Bla g 2, Bla g 4, Bla g 5, Bla g 6, Bla g 6.0101, Bla g 6.0201, Bla g 7, or a Cockroach protein or peptide set forth in any of Tables 5-8. Such nucleic acid sequences encode a sequence at least 40% or more (e.g., 45%, 50%, 55%, 60%, 65%, 70%, 75%, 80%, 85%, 90%, 95%, 96%, 97%, 98%, 99%) identical to an exemplary protein, peptide, subsequence, portion, homologue, variant or derivative thereof. In an additional embodiment, a nucleic acid encodes a sequence having a modification, such as one or more amino acid additions (insertions), deletions or substitutions of protein, peptide, subsequence, portion, homologue, variant or derivative thereof, or a Cockroach protein or peptide set forth in any of Tables 5-8.

[0130] The terms “nucleic acid,” “polynucleotide” and “polynucleotide” and the like refer to at least two or more ribo- or deoxy-ribonucleic acid base pairs (nucleotides/nucleosides) that are linked through a phosphoester bond or equivalent. Nucleic acids include polynucleotides and polynucleotides. Nucleic acids include single, double or triplex, circular or linear, molecules. Exemplary nucleic acids include but are not limited to: RNA, DNA, cDNA, genomic nucleic acid, naturally occurring and non-naturally occurring nucleic acid, e.g., synthetic nucleic acid.

[0131] Nucleic acids can be of various lengths. Nucleic acid lengths typically range from about 20 bases to 20 Kilobases (Kb), or any numerical value or range within or encompassing such lengths, 10 bases to 10 Kb, 1 to 5 Kb or less, 1000 to about 500 bases or less in length. Nucleic acids can also be shorter, for example, 100 to about 500 bases, or from about 12 to 24, 24 to 45, 45 to 90, 90 to 250, or about 250 to 500 bases in length, or any numerical value or range or value within or encompassing such lengths. In particular aspects, a nucleic acid sequence has a length from about 10-20, 20-30, 30-50, 50-100, 100-150, 150-200, 200-250, 250-300, 300-400, 400-500, 500-1000, 1000-2000 bases, or any numerical value or range within or encompassing such lengths. Shorter nucleic acids are commonly referred to as “oligonucleotides” or “probes” of single- or double-stranded DNA. However, there is no upper limit to the length of such oligonucleotides.

[0132] Nucleic acid sequences further include nucleotide and nucleoside substitutions, additions and deletions, as well as derivatized forms and fusion/chimeric sequences (e.g., encoding recombinant polypeptide). For example, due to the degeneracy of the genetic code, nucleic acids include sequences and subsequences degenerate with respect to nucleic acids that encode proteins, peptides, subsequences, portions, homologues, variants or derivatives thereof, (e.g., substitutions, additions, insertions and deletions), for example, of a Cockroach allergen such as a protein or peptide of Cockroach enolase, Hsp60, RACK1, TP1, trypsin, vitellogenin, Bla g 1, Bla g 1.0101, Bla g 2, Bla g 4, Bla g 5, Bla g 6, Bla g 6.0101, Bla g 6.0201, Bla g 7, Bla g 9, Bla g 11, NBGA1, NBGA2, NBGA3, NBGA4, NBGA5, NBGA6, NBGA7, NBGA8, NBGA9, NBGA10, NBGA11, NBGA12, NBGA13, NBGA14, NBGA15, or NBGA16, or a Cockroach protein or peptide set forth in any of Tables 5-8.

[0133] Nucleic acids can be produced using various standard cloning and chemical synthesis techniques. Techniques include, but are not limited to nucleic acid amplification, e.g., polymerase chain reaction (PCR), with genomic DNA or cDNA targets using primers (e.g., a degenerate primer mixture) capable of annealing to the encoding sequence. Nucleic acids can also be produced by chemical synthesis (e.g., solid phase phosphoramidite synthesis) or transcription from a gene. The sequences produced can then be translated in vitro, or cloned into a plasmid and propagated and then expressed in a cell (e.g., a host cell such as eukaryote or mammalian cell, yeast or bacteria, in an animal or in a plant).

[0134] Nucleic acid may be inserted into a nucleic acid construct in which expression of the nucleic acid is influenced or regulated by an “expression control element.” An “expression control element” refers to a nucleic acid sequence element that regulates or influences expression of a nucleic acid sequence to which it is operatively linked. Expression control elements include, as appropriate, promoters, enhancers, transcription terminators, gene silencers, a start codon (e.g., ATG) in front of a protein-encoding gene, etc.

[0135] An expression control element operatively linked to a nucleic acid sequence controls transcription and, as appropriate, translation of the nucleic acid sequence. Expression control elements include elements that activate transcription constitutively, that are inducible (i.e., require an external signal for activation), or derepressible (i.e., require a signal to turn transcription off; when the signal is no longer present, transcription is activated or “derepressed”), or specific for cell-types or tissues (i.e., tissue-specific control elements).

[0136] Nucleic acid can also be inserted into a plasmid for propagation into a host cell and for subsequent genetic manipulation. A plasmid is a nucleic acid that can be propagated in a host cell, plasmids may optionally contain expression control elements in order to drive expression of the nucleic acid encoding proteins, peptides, subsequences, portions, homologues, variants or derivatives thereof in the host cell. A vector is used herein synonymously with a plasmid and may also include an expression control element for expression in a host cell (e.g., expression vector). Plasmids and vectors generally contain at least an origin of replication for propagation in a cell and a promoter. Plasmids and vectors are therefore useful for genetic manipulation and expression of proteins, peptides, subsequences, portions, homologues, variants or derivatives thereof, for example, a Cockroach allergen such as a protein or peptide of Cockroach enolase, Hsp60, RACK1, TP1, trypsin, vitellogenin, Bla g 1, Bla g 1.0101, Bla g 2, Bla g 4, Bla g 5, Bla g 6, Bla g 6.0101, Bla g 6.0201, Bla g 7, Bla g 9, Bla g 11, NBGA1, NBGA2, NBGA3, NBGA4, NBGA5, NBGA6, NBGA7, NBGA8, NBGA9, NBGA10, NBGA11, NBGA12, NBGA13, NBGA14, NBGA15, or NBGA16, or a Cockroach protein or peptide set forth in any of Tables 5-8. Accordingly, vectors that include nucleic acids encoding or complementary to proteins, peptides, subsequences, portions, homologues, variants or derivatives thereof, for example, of a Cockroach allergen such as a protein or peptide of Cockroach enolase, Hsp60, RACK1, TP1, trypsin, vitellogenin, Bla g 1, Bla g 1.0101, Bla g 2, Bla g 4, Bla g 5, Bla g 6, Bla g 6.0101, Bla g 6.0201, Bla g 7, Bla g 9, Bla g 11, NBGA1, NBGA2, NBGA3, NBGA4, NBGA5, NBGA6, NBGA7, NBGA8, NBGA9, NBGA10, NBGA11, NBGA12, NBGA13, NBGA14, NBGA15, or NBGA16, or a Cockroach protein or peptide set forth in any of Tables 5-8, are provided.

[0137] In accordance with the invention, there are provided particles (e.g., viral particles) and transformed host cells that express and/or are transformed with a nucleic acid that encodes and/or express proteins, peptides, subsequences, portions, homologues, variants or derivatives thereof, for example, of a Cockroach allergen such as a protein or peptide of Cockroach enolase, Hsp60, RACK1, TP1, trypsin, vitellogenin, Bla g 1, Bla g 1.0101, Bla g 2, Bla g 4, Bla g 5, Bla g 6, Bla g 6.0101, Bla g 6.0201, Bla g 7, Bla g 9, Bla g 11, NBGA1, NBGA2, NBGA3, NBGA4, NBGA5, NBGA6, NBGA7, NBGA8, NBGA9, NBGA10, NBGA11, NBGA12, NBGA13, NBGA14, NBGA15, or NBGA16, or a Cockroach protein or peptide set forth in any of Tables 5-8. Particles and transformed host cells include but are not limited to virions, and prokaryotic and eukaryotic cells such as bacteria, fungi (yeast), plant, insect, and animal (e.g., mammalian, including primate and human, CHO cells and hybridomas) cells. For example, bacteria transformed with recombinant bacteriophage nucleic acid, plasmid nucleic acid or cosmid nucleic acid expression vectors; yeast transformed with recombinant yeast expression vectors; plant cell systems infected with recombinant virus expression vectors (e.g., cauliflower mosaic virus, CaMV; tobacco mosaic virus, TMV) or transformed with recombinant plasmid expression vectors (e.g., Ti plasmid); insect cell systems infected with recombinant virus expression vectors (e.g., baculovirus); and animal cell systems infected with recombinant virus expression vectors (e.g., retroviruses, adenovirus, vaccinia virus), or transformed animal cell systems engineered for stable expression. The cells may be a primary cell isolate, cell culture (e.g., passaged, established or immortalized cell line), or part of a plurality of cells, or a tissue or organ ex vivo or in a subject (in vivo).

[0138] The term “transformed” or “transfected” when used in reference to a cell (e.g., a host cell) or organism, means a genetic change in a cell following incorporation of an exogenous molecule, for example, a protein or nucleic acid (e.g., a transgene) into the cell. Thus, a “transfected” or “transformed” cell is a cell into which, or a progeny thereof in which an exogenous molecule has been introduced by the hand of man, for example, by recombinant DNA techniques.

[0139] The nucleic acid or protein can be stably or transiently transfected or transformed (expressed) in the host cell and progeny thereof. The cell(s) can be propagated and the introduced protein expressed, or nucleic acid transcribed. A progeny of a transfected or transformed cell may not be identical to the parent cell, since there may be mutations that occur during replication.

[0140] Expression of proteins, peptides, subsequences, portions, homologues, variants or derivatives thereof and nucleic acid in particles or introduction into target cells (e.g., host cells) can also be carried out by methods known in the art. Non-limiting examples include osmotic shock (e.g., calcium phosphate), electroporation, microinjection, cell fusion, etc. Introduction of nucleic acid and polypeptide in vitro, ex vivo and in vivo can also be accomplished using other techniques. For example, a polymeric substance, such as polyesters, polyamine acids, hydrogel, polyvinyl pyrrolidone, ethylene-vinylacetate, methylcellulose, carboxymethylcellulose, protamine sulfate, or lactide/glycolide copolymers, polylactide/glycolide copolymers, or ethylenevinylacetate copolymers. A nucleic acid can be entrapped in microcapsules prepared by coacervation techniques or by interfacial polymerization, for example, by the use of hydroxymethylcellulose or gelatin-microcapsules, or poly (methylmethacrolate) microcapsules, respectively, or in a colloid system. Colloidal dispersion systems include macromolecule complexes, nano-capsules, microspheres, beads, and lipid-based systems, including oil-in-water emulsions, micelles, mixed micelles, and liposomes.

[0141] Liposomes for introducing various compositions into cells are known in the art and include, for example, phosphatidylcholine, phosphatidylserine, lipofectin and DOTAP (e.g., U.S. Pat. Nos. 4,844,904, 5,000,959, 4,863,740, and 4,975,282; and GIBCO-BRL, Gaithersburg, Md.). Piperazine based amphilic cationic lipids useful for gene therapy also are known (see, e.g., U.S. Pat. No. 5,861,397). Cationic lipid systems also are known (see, e.g., U.S. Pat. No. 5,459,127). Polymeric substances, microcapsules and colloidal dispersion systems such as liposomes are collectively referred to herein as “vesicles.” Accordingly, viral and non-viral vector means delivery into cells are included.

[0142] Cockroach proteins, peptides, subsequences, portions, homologues, variants or derivatives thereof, for example, a Cockroach allergen such as a protein or peptide of Cockroach enolase, Hsp60, RACK1, TP1, trypsin, vitellogenin, Bla g 1, Bla g 1.0101, Bla g 2, Bla g 4, Bla g 5, Bla g 6, Bla g 6.0101, Bla g 6.0201, Bla g 7, Bla g 9, Bla g 11, NBGA1, NBGA2, NBGA3, NBGA4, NBGA5, NBGA6, NBGA7, NBGA8, NBGA9, NBGA10, NBGA11, NBGA12, NBGA13, NBGA14, NBGA15, or NBGA16, or a Cockroach protein or peptide set forth in any of Tables 5-8, are provided, can be employed in various methods and uses and medicaments. Such methods and uses and medicaments include, for example, administration in vitro and in vivo of one or more proteins, peptides, subsequences, portions, homologues, variants or derivatives thereof, such as protein or peptide of Cockroach enolase, Hsp60, RACK1, TP1, trypsin, vitellogenin, Bla g 1, Bla g 1.0101, Bla g 2, Bla g 4, Bla g 5, Bla g 6, Bla g 6.0101, Bla g 6.0201, Bla g 7, Bla g 9, Bla g 11, NBGA1, NBGA2, NBGA3, NBGA4, NBGA5, NBGA6, NBGA7, NBGA8, NBGA9, NBGA10, NBGA11, NBGA12, NBGA13, NBGA14, NBGA15, or NBGA16, or a Cockroach protein or peptide set forth in any of Tables 5-8, or subsequences, portions, homologues, variants or derivatives thereof.

[0143] The methods and uses and medicaments provided include methods and uses and medicaments for modulating an immune response, including, among others, methods and uses and medicaments for protecting and treating subjects against a disorder, disease; and methods and uses of and medicaments for providing specific immunotherapy; and methods and uses of detection and diagnosis.

[0144] In particular embodiments, methods and uses include administration or delivery of a protein, peptide, subsequence, portion, homologue, variants or derivative thereof described herein (e.g., of any Cockroach allergen such as a protein or peptide of Cockroach enolase, Hsp60, RACK1, TP1, trypsin, vitellogenin, Bla g 1, Bla g 1.0101, Bla g 2, Bla g 4, Bla g 5, Bla g 6, Bla g 6.0101, Bla g 6.0201, Bla g 7, Bla g 9, Bla g 11, NBGA1, NBGA2, NBGA3, NBGA4, NBGA5, NBGA6, NBGA7, NBGA8, NBGA9, NBGA10, NBGA11, NBGA12, NBGA13, NBGA14, NBGA15, or NBGA16, or a Cockroach protein or peptide set forth in any of Tables 5-8) to modulate an immune response in a subject, including, for example, modulating an immune response to an allergen or antigen.

[0145] As used herein, the term “modulate,” means an alteration or effect on the term modified. For example, the term modulate can be used in various contexts to refer to an alteration or effect of an activity, a function, or expression of a polypeptide, gene or signaling pathway, or a physiological condition or response of an organism. In certain embodiments, modulating involves decreasing, reducing, inhibiting, suppressing or disrupting an immune response of a subject to an antigen or allergen. In other embodiments, modulating involves eliciting, stimulating, inducing, promoting, increasing or enhancing an immune response of a subject to an antigen or allergen. Thus, where the term “modulate” is used to modify the term “immune response against an allergen in a subject” this means that the immune response in the subject to the allergen is altered or affected (e.g., decreased, reduced, inhibited, suppressed, limited, controlled, prevented, elicited, promoted, stimulated, increased, induced, enhanced, etc.).

[0146] Methods and uses and medicaments for modulating an immune response against an antigen or allergen as described herein may be used to provide a subject with protection against an allergic response or reaction to the allergen, or allergic disorder or allergic disease, or one or more physiological conditions, disorders, illnesses, diseases, symptoms or complications caused by or associated with the allergen. Accordingly, in other embodiments, methods and uses include administering a protein, peptide, subsequence, portion, homologue, variant or derivative thereof described herein (e.g., of any Cockroach allergen such as a protein or peptide of Cockroach enolase, Hsp60, RACK1, TP1, trypsin, vitellogenin, Bla g 1, Bla g 1.0101, Bla g 2, Bla g 4, Bla g 5, Bla g 6, Bla g 6.0101, Bla g 6.0201, Bla g 7, Bla g 9, Bla g 11, NBGA1, NBGA2, NBGA3, NBGA4, NBGA5, NBGA6, NBGA7, NBGA8, NBGA9, NBGA10, NBGA11, NBGA12, NBGA13, NBGA14, NBGA15, or NBGA16, or a Cockroach protein or peptide set forth in any of Tables 5-8) to protect or treat a subject against an allergic response, allergic disorder or allergic disease, or one or more physiological conditions, disorders, illnesses, diseases, symptoms or complications caused by or associated with an allergen. In still other embodiments, methods and uses include administering or delivering a protein, peptide, subsequence, portion, homologue, variant or derivative thereof described herein (e.g., of any Cockroach allergen such as a protein or peptide of Cockroach enolase, Hsp60, RACK1, TP1, trypsin, vitellogenin, Bla g 1, Bla g 1.0101, Bla g 2, Bla g 4, Bla g 5, Bla g 6, Bla g 6.0101, Bla g 6.0201, Bla g 7, Bla g 9, Bla g 11, NBGA1, NBGA2, NBGA3, NBGA4, NBGA5, NBGA6, NBGA7, NBGA8, NBGA9, NBGA10, NBGA11, NBGA12, NBGA13, NBGA14, NBGA15, or NBGA16, or a Cockroach protein or peptide set forth in any of Tables 5-8) to elicit, stimulate, induce, promote, increase or enhance immunological tolerance of a subject to an antigen or allergen.

[0147] In various embodiments, there are provided methods and uses of and medicaments for providing a subject with protection against an allergic response, allergic disorder or allergic disease, or one or more physiological conditions, disorders, illnesses, diseases, symptoms or complications caused by or associated with an allergen. In various aspects, a method or use includes administering to the subject an amount of a protein, peptide, subsequence, portion, homologue, variant or derivative thereof described herein (e.g., any Cockroach allergen such as a protein or peptide Cockroach enolase, Hsp60, RACK1, TP1, trypsin, vitellogenin, Bla g 1, Bla g 1.0101, Bla g 2, Bla g 4, Bla g 5, Bla g 6, Bla g 6.0101, Bla g 6.0201, Bla g 7, Bla g 9, Bla g 11, NBGA1, NBGA2, NBGA3, NBGA4, NBGA5, NBGA6, NBGA7, NBGA8, NBGA9, NBGA10, NBGA11, NBGA12, NBGA13, NBGA14, NBGA15, or NBGA16, or a Cockroach protein or peptide set forth in any of Tables 5-8) sufficient to provide the subject with protection against the allergic response, allergic disorder or allergic disease, or one or more physiological conditions, disorders, illnesses, diseases, symptoms or complications caused by or associated with the allergen.

[0148] Methods and uses and medicaments of the invention include providing a subject with protection against an antigen or allergen, or one or more physiological conditions, disorders, illnesses, diseases, symptoms or complications caused by or associated with the exposure to the antigen or allergen, for example, vaccinating the subject to protect against an allergic response to the allergen, for example with any Cockroach allergen such as a protein or peptide of Cockroach enolase, Hsp60, RACK1, TP1, trypsin, vitellogenin, Bla g 1, Bla g 1.0101, Bla g 2, Bla g 4, Bla g 5, Bla g 6, Bla g 6.0101, Bla g 6.0201, Bla g 7, Bla g 9, Bla g 11, NBGA1, NBGA2, NBGA3, NBGA4, NBGA5, NBGA6, NBGA7, NBGA8, NBGA9, NBGA10, NBGA11, NBGA12, NBGA13, NBGA14, NBGA15, or NBGA16, or a Cockroach protein or peptide set forth in any of Tables 5-8. In certain embodiments, methods and uses include protecting the subject against an allergic response or reaction by inducing tolerance of the subject (desensitizing) to the allergen.

[0149] As used herein, the terms “protection,” “protect” and grammatical variations thereof, when used in reference to an allergic response or one or more physiological conditions, disorders, illnesses, diseases, symptoms or complications caused by or associated with the exposure to allergen, means preventing an allergic response, reaction, or one or more physiological conditions, disorders, illnesses, diseases, symptoms or complications caused by or associated with the exposure to the allergen, or reducing or decreasing susceptibility to an allergic response, reaction, or one or more physiological conditions, disorders, illnesses, diseases, symptoms or complications caused by or associated with the exposure to the allergen.

[0150] An allergic response includes but is not limited to an allergic reaction, hypersensitivity, an inflammatory response or inflammation. In certain embodiments allergic response may involve one or more of cell infiltration, production of antibodies, production of cytokines, lymphokines, chemokines, interferons and interleukins, cell growth and maturation factors (e.g., differentiation factors), cell proliferation, cell differentiation, cell accumulation or migration (chemotaxis) and cell, tissue or organ damage or remodeling. In particular aspects, an allergic response may include Allergic rhinitis; Onchocercal dermatitis; Atopic dermatitis; allergic conjunctivitis; Drug reactions; Nodules, eosinophilia, rheumatism, dermatitis, rashes, hives, and swelling (NERDS); esophageal and a gastrointestinal allergy.

[0151] Allergic responses can occur systemically, or locally in any region, organ, tissue, or cell. In particular aspects, an allergic response occurs in the skin, the upper respiratory tract, the lower respiratory tract, pancreas, thymus, kidney, liver, spleen, muscle, nervous system, skeletal joints, eye, mucosal tissue, gut or bowel.

[0152] Methods and uses and medicaments herein include treating a subject for an allergic response, allergic disorder or allergic disease, as well as one or more physiological conditions, disorders, illnesses, diseases, symptoms or complications caused by or associated with an allergen. Such methods and uses include administering to a subject an amount of a protein, peptide, subsequence, portion, homologue, variant or derivative thereof described herein (e.g., any Cockroach allergen such as a protein or peptide of Cockroach enolase, Hsp60, RACK1, TP1, trypsin, vitellogenin, Bla g 1, Bla g 1.0101, Bla g 2, Bla g 4, Bla g 5, Bla g 6, Bla g 6.0101, Bla g 6.0201, Bla g 7, Bla g 9, Bla g 11, NBGA1, NBGA2, NBGA3, NBGA4, NBGA5, NBGA6, NBGA7, NBGA8, NBGA9, NBGA10, NBGA11, NBGA12, NBGA13, NBGA14, NBGA15, or NBGA16, or a Cockroach protein or peptide set forth in any of Tables 5-8) sufficient to treat the subject for the allergic response, allergic disorder or allergic disease, or one or more physiological conditions, disorders, illnesses, diseases, symptoms or complications caused by or associated with the allergen.

[0153] As will be understood by a person skilled in the art, treating an allergic response, allergic disorder or allergic disease, or one or more physiological conditions, disorders, illnesses, diseases, symptoms or complications caused by or associated with an allergen may include decreasing, reducing, inhibiting, suppressing, limiting, controlling or clearing an allergic response, an allergic disorder or allergic disease, or one or more physiological conditions, disorders, illnesses, diseases, symptoms or complications caused by or associated with the allergen. Thus in certain embodiments, a method or use of treating a subject for a an allergic response, allergic disorder or allergic disease, or one or more physiological conditions, disorders, illnesses, diseases, symptoms or complications caused by or associated with an allergen comprises elimination of the allergic response, allergic disorder or allergic disease, or one or more physiological conditions, disorders, illnesses, diseases, symptoms or complications caused by or associated with the allergen from a subject. In other embodiments, a method or use of treating a subject for an allergic response, allergic disorder or allergic disease, or one or more physiological conditions, disorders, illnesses, diseases, symptoms or complications caused by or associated with an allergen includes reducing occurrence, frequency, severity, progression, or duration of the allergic response, allergic disorder or allergic disease, or one or more physiological conditions, disorders, illnesses, diseases, symptoms or complications caused by or associated with the allergen in the subject. In yet another embodiment, a method or use of treating a subject for an allergic response, allergic disorder or allergic disease, or one or more physiological conditions, disorders, illnesses, diseases, symptoms or complications caused by or associated with an allergen, includes stabilizing the allergic response, allergic disorder or allergic disease, or one or more physiological conditions, disorders, illnesses, diseases, symptoms or complications caused by or associated with the allergen in a subject by preventing an increase in the occurrence, frequency, severity, progression, or duration of the allergic response, allergic disorder or allergic disease, or one or more physiological conditions, disorders, illnesses, diseases, symptoms or complications caused by or associated with contact of the subject with an allergen.

[0154] Methods and uses and medicaments of the invention include treating or administering a subject previously exposed to an antigen or allergen. Thus, in certain embodiments, methods and uses and medicaments are for treating or protecting a subject from an allergic response, allergic disorder or allergic disease, or one or more physiological conditions, disorders, illnesses, diseases, symptoms or complications caused by or associated with secondary or subsequent exposure to an antigen or allergen.

[0155] Physiological conditions, disorders, illnesses, diseases, symptoms or complications caused by or associated with an antigen/allergen treatable in accordance with the invention methods and uses and medicaments include but are not limited to asthma, allergic asthma, bronchiolitis and pleuritis, Allergic rhinitis; Onchocercal dermatitis; Atopic dermatitis; allergic conjunctivitis; Drug reactions; Nodules, eosinophilia, rheumatism, dermatitis, rashes, hives, and swelling (NERDS); esophageal and a gastrointestinal allergy, Airway Obstruction, Apnea, Asbestosis, Atelectasis, Berylliosis, Bronchiectasis, Bronchiolitis, Bronchiolitis Obliterans Organizing Pneumonia, Bronchitis, Bronchopulmonary Dysplasia, Empyema, Pleural Empyema, Pleural Epiglottitis, Hemoptysis, Hypertension, Kartagener Syndrome, Meconium Aspiration, Pleural Effusion, Pleurisy, Pneumonia, Pneumothorax, Respiratory Distress Syndrome, Respiratory Hypersensitivity, Rhinoscleroma, Scimitar Syndrome, Severe Acute Respiratory Syndrome, Silicosis, Tracheal Stenosis, eosinophilic pleural effusions, Histiocytosis; chronic eosinophilic pneumonia; hypersensitivity pneumonitis; Allergic bronchopulmonary aspergillosis; Sarcoidosis; Idiopathic pulmonary fibrosis; pulmonary edema; pulmonary embolism; pulmonary emphysema; Pulmonary Hyperventilation; Pulmonary Alveolar Proteinosis; Chronic Obstructive Pulmonary Disease (COPD); Interstitial Lung Disease; and Topical eosinophilia.

[0156] Cockroach proteins, peptides, subsequences, portions, homologues, variants and derivatives thereof, described herein may elicit, stimulate, induce, promote, increase or enhance immunological tolerance to an antigen, including an allergen. Methods and uses and medicaments of the invention therefore further include inducing immunological tolerance of a subject to an antigen or allergen. Thus, for example, Cockroach proteins, peptides, subsequences, portions, homologues, variants and derivatives thereof, described herein can be effective in treatment (e.g., therapeutic) of an allergic immune response, including but not limited to an allergic immune response following a secondary or subsequent exposure of a subject to an antigen (allergen). In one embodiment, a method or use includes administering to the subject an amount of a protein, peptide, subsequence, portion, homologue, variant or derivative thereof described herein (e.g., any Cockroach allergen such as a protein or peptide of Cockroach enolase, Hsp60, RACK1, TP1, trypsin, vitellogenin, Bla g 1, Bla g 1.0101, Bla g 2, Bla g 4, Bla g 5, Bla g 6, Bla g 6.0101, Bla g 6.0201, Bla g 7, Bla g 9, Bla g 11, NBGA1, NBGA2, NBGA3, NBGA4, NBGA5, NBGA6, NBGA7, NBGA8, NBGA9, NBGA10, NBGA11, NBGA12, NBGA13, NBGA14, NBGA15, or NBGA16, or a Cockroach protein or peptide set forth in any of Tables 5-8) sufficient to induce tolerance in the subject to the antigen or allergen. In particular aspects, the immunological tolerance elicited, stimulated, induced, promoted, increased or enhanced may involve modulation of T cell activity, including but not limited to CD4+ T cells, CD8+ T cells, Th1 cells, Th2 cells and regulatory T cells. For example, immunological tolerance elicited, stimulated, induced, promoted, increased or enhanced from administration of the Cockroach proteins or peptides, or subsequence, portion, homologue, variant or derivative thereof, may involve modulation of the production or activity of pro-inflammatory or anti-inflammatory cytokines produced by T cells.

[0157] In additional embodiments, a method or use of inducing immunological tolerance in a subject to an allergen includes a reduction in occurrence, frequency, severity, progression, or duration of physiological conditions, disorders, illnesses, diseases, symptoms or complications caused by or associated an allergic response to the allergen in the subject. Thus, in certain embodiments, inducing immunological tolerance can protect a subject against or treat a subject for an allergic response, allergic disorder or allergic disease, or one or more physiological conditions, disorders, illnesses, diseases, symptoms or complications caused by or associated with an antigen or allergen.

[0158] Methods and uses and medicaments for inducing immunological tolerance (desensitizing) described herein may include eliciting, stimulating, inducing, promoting, increasing or enhancing an immune response. In certain embodiments, inducing immunological tolerance may include eliciting, stimulating, inducing, promoting, increasing or enhancing an immune response that decreases, reduces, inhibits, suppresses, limits, controls or clears an allergic response. For example, in certain embodiments inducing immunological tolerance may include eliciting, stimulating, inducing, promoting, increasing or enhancing proliferation or activity of regulatory T cells. In other embodiments, inducing immunological tolerance may include eliciting, stimulating, inducing, promoting, increasing or enhancing an immune response that promotes an allergic response. As will be understood by a person of skill in the art, a method or use that elicits, stimulates, induces, promotes, increases or enhances an immune response that promotes an allergic response may still induce immunological tolerance by also eliciting, stimulating, inducing, promoting, increasing or enhancing an immune response that decreases, reduces, inhibits, suppresses, limits, controls or clears an allergic response. In particular embodiments, inducing immunological tolerance includes eliciting, stimulating, inducing, promoting, increasing or enhancing an immune responses that decreases, reduces, inhibits, suppresses, limits, controls or clears an allergic response that is stronger than the immune response that promotes an allergic response. In other embodiments, inducing immunological tolerance includes eliciting, stimulating, inducing, promoting, increasing or enhancing more immune responses that decrease, reduce, inhibit, suppress, limit, controls or clear an allergic response than immune responses that promote an allergic response.

[0159] Methods and uses and medicaments of the invention include treating a subject via specific immunotherapy. In one embodiment, a method or use includes administering to the subject an amount of a protein, peptide, subsequence, portion, homologue, variant or derivative thereof described herein (e.g., any Cockroach allergen such as a protein or peptide of Cockroach enolase, Hsp60, RACK1, TP1, trypsin, vitellogenin, Bla g 1, Bla g 1.0101, Bla g 2, Bla g 4, Bla g 5, Bla g 6, Bla g 6.0101, Bla g 6.0201, Bla g 7, Bla g 9, Bla g 11, NBGA1, NBGA2, NBGA3, NBGA4, NBGA5, NBGA6, NBGA7, NBGA8, NBGA9, NBGA10, NBGA11, NBGA12, NBGA13, NBGA14, NBGA15, or NBGA16, or a Cockroach protein or peptide set forth in any of Tables 5-8). In one aspect, an antigen (allergen) administered to a subject during specific immunotherapy to treat the subject is the same antigen (allergen) to which the subject has been sensitized or is hypersensitive (e.g., allergic). In another non-limiting aspect, an antigen (allergen) administered to a subject to treat the subject is a different antigen (allergen) to which the subject has been sensitized or is hypersensitive (e.g., allergic). Thus, in different embodiments, the antigen administered and antigen (e.g., allergen) against which immunological tolerance is sought may be the same protein (antigen, allergen), may be proteins (antigens, allergens) of the same organism or may be proteins (antigens, allergens) of different organisms.

[0160] In accordance with the invention, methods and uses and medicaments include therapeutic (following antigen/allergen exposure) and prophylactic (prior to antigen/allergen exposure) uses and methods. For example, therapeutic and prophylactic methods and uses of treating a subject for an allergic response, allergic disorder or allergic disease, or one or more physiological conditions, disorders, illnesses, diseases, symptoms or complications caused by or associated with an allergen, include but are not limited to treatment of a subject having or at risk of having an allergic response, allergic disorder or allergic disease, or one or more physiological conditions, disorders, illnesses, diseases, symptoms or complications caused by or associated with an allergen; treating a subject with an allergic response, allergic disorder or allergic disease, or one or more physiological conditions, disorders, illnesses, diseases, symptoms or complications caused by or associated with an allergen; and methods and uses and medicaments of protecting a subject from an allergic response, allergic disorder or allergic disease, or one or more physiological conditions, disorders, illnesses, diseases, symptoms or complications caused by or associated with an antigen/allergen (e.g., provide the subject with protection against an allergic reaction to an allergen), to decrease or reduce the probability of an allergic response, allergic disorder or allergic disease, or one or more physiological conditions, disorders, illnesses, diseases, symptoms or complications caused by or associated with an allergen, in a subject and to decrease or reduce susceptibility of a subject to an allergic response, allergic disorder or allergic disease, or one or more physiological conditions, disorders, illnesses, diseases, symptoms or complications caused by or associated with an allergen, to inhibit or prevent an allergic response, allergic disorder or allergic disease, or one or more physiological conditions, disorders, illnesses, diseases, symptoms or complications caused by or associated with an allergen, in a subject. Accordingly, methods and uses and medicaments can treat an allergic response, allergic disorder or allergic disease, or one or more physiological conditions, disorders, illnesses, diseases, symptoms or complications caused by or associated with an allergen, or provide a subject with protection from an allergic response, allergic disorder or allergic disease, or one or more physiological conditions, disorders, illnesses, diseases, symptoms or complications caused by or associated with an allergen (e.g., prophylactic protection).

[0161] As described herein, proteins, peptides, subsequences, portions, homologues, variants and derivatives thereof include T cell epitopes, such as Th2 cell epitopes. Accordingly, methods and uses of the invention include administering an amount of a protein, peptide, subsequence, portion, homologue, variant or derivative thereof (e.g., a T cell epitope) to a subject sufficient to provide the subject with protection against an allergic response, allergic disorder or allergic disease, or one or more physiological conditions, disorders, illnesses, diseases, symptoms or complications caused by or associated with an allergen. In another embodiment, a method includes administering an amount of a protein, peptide, subsequence, portion, homologue, variant or derivative thereof (e.g., a T cell epitope, such as a Th2 cell epitope) to a subject sufficient to treat, vaccinate or immunize the subject against an allergic response, allergic disorder or allergic disease, or one or more physiological conditions, disorders, illnesses, diseases, symptoms or complications caused by or associated with an allergen.

[0162] In accordance with the invention, methods and uses of modulating anti-allergen activity of T cells, including but not limited to CD8⁺ T cells, CD4⁺ T cells, Th1 cells or Th2 cells, in a subject are provided. In one embodiment, a method or use includes administering to a subject an amount of a protein, peptide, subsequence, portion, homologue, variant or derivative thereof (e.g., a Cockroach protein or peptide set forth in any of Tables 5-8), such as a T cell epitope, sufficient to modulate Th2 cell activity in the subject.

[0163] In all methods and uses and medicaments of the invention, any appropriate protein, peptide, subsequence, portion, homologue, variant or derivative thereof can be used or administered. In particular non-limiting examples, the protein, peptide, subsequence, portion, homologue, variant or derivative thereof comprises, consists of or consists essentially of a Cockroach allergen such as a protein or peptide of Cockroach enolase, Hsp60, RACK1, TP1, trypsin, vitellogenin, Bla g 1, Bla g 1.0101, Bla g 2, Bla g 4, Bla g 5, Bla g 6, Bla g 6.0101, Bla g 6.0201, Bla g 7, Bla g 9, Bla g 11, NBGA1, NBGA2, NBGA3, NBGA4, NBGA5, NBGA6, NBGA7, NBGA8, NBGA9, NBGA10, NBGA11, NBGA12, NBGA13, NBGA14, NBGA15, or NBGA16, or a Cockroach protein or peptide set forth in any of Tables 5-8, or a subsequence, portion, homologue, variant or derivative thereof.

[0164] In certain embodiments, two or more proteins, peptides, subsequences, portions, homologues, variants or derivatives thereof, may be administered to a subject. In particular embodiments, a protein, peptide, subsequence, portion, homologue, variant or derivative thereof consists of or consists essentially of an amino acid sequence of a Cockroach allergen such as a protein or peptide of Cockroach enolase, Hsp60, RACK1, TP1, trypsin, vitellogenin, Bla g 1, Bla g 1.0101, Bla g 2, Bla g 4, Bla g 5, Bla g 6, Bla g 6.0101, Bla g 6.0201, Bla g 7, Bla g 9, Bla g 11, NBGA1, NBGA2, NBGA3, NBGA4, NBGA5, NBGA6, NBGA7, NBGA8, NBGA9, NBGA10, NBGA11, NBGA12, NBGA13, NBGA14, NBGA15, or NBGA16, or a Cockroach protein or peptide set forth in any of Tables 5-8, or subsequence, portion, homologue, variant or derivative thereof, and is administered with one or more other proteins, peptides, subsequences, portions, homologues, variants or derivatives thereof. Two or more proteins, peptides, subsequences, portions, homologues, variants or derivatives thereof may be administered as a combination composition, or administered separately, such as concurrently or in series or sequentially. Different proteins, peptides, subsequences, portions, homologues, variants or derivatives thereof, may be administered to a subject in the same amount, volume or concentration, or different amounts, volumes or concentrations. Thus, in certain embodiments, the subject may be administered the same amount of two or more different proteins, peptides, subsequences, portions, homologues, variants or derivatives thereof; and in other embodiments, the subject may be administered one protein, peptide, subsequence, portion, homologue, variant or derivative thereof in an amount, volume or concentration greater than one or more other protein, peptide, subsequence, portion, homologue, variant or derivative thereof administered to the subject.

[0165] Methods and uses of the invention include a favorable response or an improvement in one or more physiological conditions, disorders, illnesses, diseases, symptoms or complications caused by or associated with an antigen/allergen. In particular embodiments, a favorable response or improvement includes but is not limited to reduce, decrease, suppress, limit, control or inhibit an allergic response including reducing, decreasing, suppressing, limiting, controlling or inhibiting immune cell proliferation, function or activity, or eliciting, stimulating, inducing, promoting, increasing or enhancing immune cell proliferation or activity (e.g. regulatory T cells); or reduce, decrease, suppress, limit, control or inhibit the amount of allergen. In additional particular embodiments, an amount of a protein, peptide, subsequence, portion, homologue, variant or derivative thereof is sufficient to elicit, stimulate, induce, promote, increase or enhance or augment immunological tolerance to an allergen; or decrease, reduce, inhibit, suppress, prevent, control, or limit an allergic reaction or response. In further particular embodiments, an amount of a protein, peptide, subsequence, portion, homologue, variant or derivative thereof is sufficient to protect a subject from an allergic response or reduce, decrease, limit, control or inhibit susceptibility to an allergic response, allergic disorder or allergic disease, or one or more physiological conditions, disorders, illnesses, diseases, symptoms or complications caused by or associated with an allergen.

[0166] Methods and uses of the invention therefore include any therapeutic or beneficial effect. In various methods embodiments, an allergic response, allergic disorder or allergic disease, or one or more physiological conditions, disorders, illnesses, diseases, symptoms or complications caused by or associated with an allergen is reduced, decreased, inhibited, limited, delayed or prevented. Physiological conditions, disorders, illnesses and diseases associated with an antigen/allergen include but are not limited to asthma, allergic asthma, bronchiolitis and pleuritis, Allergic rhinitis; Onchocercal dermatitis; Atopic dermatitis; allergic conjunctivitis; Drug reactions; Nodules, eosinophilia, rheumatism, dermatitis, rashes, hives, and swelling (NERDS); esophageal and a gastrointestinal allergy, Airway Obstruction, Apnea, Asbestosis, Atelectasis, Berylliosis, Bronchiectasis, Bronchiolitis, Bronchiolitis Obliterans Organizing Pneumonia, Bronchitis, Bronchopulmonary Dysplasia, Empyema, Pleural Empyema, Pleural Epiglottitis, Hemoptysis, Hypertension, Kartagener Syndrome, Meconium Aspiration, Pleural Effusion, Pleurisy, Pneumonia, Pneumothorax, Respiratory Distress Syndrome, Respiratory Hypersensitivity, Rhinoscleroma, Scimitar Syndrome, Severe Acute Respiratory Syndrome, Silicosis, Tracheal Stenosis, eosinophilic pleural effusions, Histiocytosis; chronic eosinophilic pneumonia; hypersensitivity pneumonitis; Allergic bronchopulmonary aspergillosis; Sarcoidosis; Idiopathic pulmonary fibrosis; pulmonary edema; pulmonary embolism; pulmonary emphysema; Pulmonary Hyperventilation; Pulmonary Alveolar Proteinosis; Chronic Obstructive Pulmonary Disease (COPD); Interstitial Lung Disease; and Topical eosinophilia. Symptoms and complications associated with an allergen include but are not limited to cell infiltration, production of antibodies, production of cytokines, lymphokines, chemokines, interferons and interleukins, cell growth and maturation factors (e.g., differentiation factors), cell proliferation, cell differentiation, cell accumulation or migration and cell, tissue or organ damage or remodelling, allergic rhinitis; Onchocercal dermatitis; Atopic dermatitis; allergic conjunctivitis; Drug reactions; Nodules, eosinophilia, rheumatism, dermatitis, rashes, hives, and swelling (NERDS); esophageal and a gastrointestinal allergy. Additional symptoms of antigen/allergen exposure are known to one of skill in the art and treatment thereof in accordance with the invention is provided.

[0167] Methods and uses of the invention moreover include reducing, decreasing, inhibiting, delaying or preventing onset, progression, frequency, duration, severity, probability or susceptibility of one or more adverse symptoms, disorders, illnesses, diseases or complications caused by or associated with an antigen/allergen (e.g., any Cockroach allergen). In further various particular embodiments, methods and uses include improving, accelerating, facilitating, enhancing, augmenting, or hastening recovery of a subject from an allergic response, allergic disorder or allergic disease, or one or more physiological conditions, disorders, illnesses, diseases, symptoms or complications caused by or associated with an antigen/allergen. In yet additional various embodiments, methods and uses include stabilizing an allergic response, allergic disorder or allergic disease, or one or more physiological conditions, disorders, illnesses, diseases, symptoms or complications caused by or associated with an antigen/allergen (e.g., any Cockroach allergen).

[0168] A therapeutic or beneficial effect is therefore any objective or subjective measurable or detectable improvement or benefit provided to a particular subject. A therapeutic or beneficial effect can but need not be complete ablation of all or any allergic response, allergic disorder or allergic disease, or one or more physiological conditions, disorders, illnesses, diseases, symptoms or complications caused by or associated with an allergen. Thus, a satisfactory clinical endpoint is achieved when there is an incremental improvement or a partial reduction in an allergic response, allergic disorder or allergic disease, or one or more physiological conditions, disorders, illnesses, diseases, symptoms or complications caused by or associated with an allergen, or an inhibition, decrease, reduction, suppression, prevention, limit or control of worsening or progression of an allergic response, allergic disorder or allergic disease, or one or more physiological conditions, disorders, illnesses, diseases, symptoms or complications caused by or associated with an allergen, over a short or long duration (hours, days, weeks, months, etc.).

[0169] A therapeutic or beneficial effect also includes reducing or eliminating the need, dosage frequency or amount of a second therapeutic protocol or active such as another drug or other agent (e.g., anti-inflammatory) used for treating a subject having or at risk of having an allergic response, allergic disorder or allergic disease, or one or more physiological conditions, disorders, illnesses, diseases, symptoms or complications caused by or associated with an allergen. For example, reducing an amount of an adjunct therapy, such as a reduction or decrease of a treatment for an allergic response, allergic disorder or allergic disease, or one or more physiological conditions, disorders, illnesses, diseases, symptoms or complications caused by or associated with an allergen, or a specific immunotherapy, vaccination or immunization protocol is considered a beneficial effect. In addition, reducing or decreasing an amount of protein, peptide, subsequence, portion, homologue, variant or derivative thereof, used for specific immunotherapy, vaccination or immunization of a subject to provide protection to the subject is considered a beneficial effect.

[0170] As disclosed herein, invention proteins, peptides, subsequences, etc., can be used in methods of providing specific immunotherapy to a subject, such as a subject with or at risk of an allergic response, allergic disorder or allergic disease, or one or more physiological conditions, disorders, illnesses, diseases, symptoms or complications caused by or associated with an allergen. In one embodiment, a method or use includes administering to a subject an amount of a protein, peptide, subsequence, portion, homologue, variant or derivative thereof sufficient to elicit, stimulate, induce, promote, increase, enhance or augment immunological tolerance in the subject to an antigen/allergen. In another embodiment, a method includes administering to a subject an amount of a nucleic acid encoding all or a portion (e.g., a T cell epitope) of a protein, peptide, subsequence, portion, homologue, variant or derivative thereof sufficient to elicit, stimulate, induce, promote, increase, enhance or augment immunological tolerance of the subject to an allergen.

[0171] When an antigen(s) or allergen(s) is administered to induce tolerance (desensitize), an amount or dose of the antigen or allergen to be administered (e.g., a Cockroach allergen such as a protein or peptide of Cockroach enolase, Hsp60, RACK1, TP1, trypsin, vitellogenin, Bla g 1, Bla g 1.0101, Bla g 2, Bla g 4, Bla g 5, Bla g 6, Bla g 6.0101, Bla g 6.0201, Bla g 7, Bla g 9, Bla g 11, NBGA1, NBGA2, NBGA3, NBGA4, NBGA5, NBGA6, NBGA7, NBGA8, NBGA9, NBGA10, NBGA11, NBGA12, NBGA13, NBGA14, NBGA15, or NBGA16, or a Cockroach protein or peptide set forth in any of Tables 5-8), and the period of time required to achieve a desired outcome or result (e.g., to desensitize or develop tolerance to the antigen or allergen) can be determined by one skilled in the art. The antigen or allergen may be administered to the patient through any route known in the art, including, but not limited to oral, inhalation, sublingual, epicutaneous, intranasal, and/or parenteral routes (intravenous, intramuscular, subcutaneously, and intraperitoneal).

[0172] Methods and uses of the invention include administration of a protein, peptide, subsequence, portion, homologue, variant or derivative thereof to a subject prior to contact by or exposure to an allergen; administration prior to, substantially contemporaneously with or after a subject has been contacted by or exposed to an allergen; and administration prior to, substantially contemporaneously with or after an allergic response, allergic disorder or allergic disease, or one or more physiological conditions, disorders, illnesses, diseases, symptoms or complications caused by or associated with an allergen. A subject contacted by or exposed to an allergen may have contact or exposure over a period of 1-5, 5-10, 10-20, 20-30, 30-50, 50-100 hours, days, months, or years.

[0173] Invention compositions (e.g., proteins, peptides, subsequences, portions, homologues, variants or derivatives thereof, including T cell epitopes, for example, of an amino acid sequence of a Cockroach allergen such as a protein or peptide of Cockroach enolase, Hsp60, RACK1, TP1, trypsin, vitellogenin, Bla g 1, Bla g 1.0101, Bla g 2, Bla g 4, Bla g 5, Bla g 6, Bla g 6.0101, Bla g 6.0201, Bla g 7, Bla g 9, Bla g 11, NBGA1, NBGA2, NBGA3, NBGA4, NBGA5, NBGA6, NBGA7, NBGA8, NBGA9, NBGA10, NBGA11, NBGA12, NBGA13, NBGA14, NBGA15, or NBGA16, or a Cockroach protein or peptide set forth in any of Tables 5-8), methods and uses and medicaments can be combined with any compound, agent, drug, treatment or other therapeutic regimen or protocol having a desired therapeutic, beneficial, additive, synergistic or complementary activity or effect. Exemplary combination compositions and treatments include multiple proteins, peptides, subsequences, portions, homologues, variants or derivatives thereof, such as a combination of any of the Cockroach proteins and peptides set forth herein, and/or a combination of any of the subsequences, portions, homologues, variants or derivatives thereof.

[0174] Additional combinations include second actives, such as anti-allergen compounds, agents, drugs, treatments and therapies, including but not limited to anti-histamines, anti-inflammatories, decongestants and corticosteroids as well as agents that assist, promote, stimulate or enhance efficacy. Such anti-allergen drugs, agents, treatments and therapies can be administered or performed prior to, substantially contemporaneously with or following any method or use described herein, for example, a therapeutic use or method of treating a subject for an allergic response, allergic disorder or allergic disease, or one or more physiological conditions, disorders, illnesses, diseases, symptoms or complications caused by or associated with an allergen, or a method or use of providing specific immunotherapy to a subject.

[0175] Accordingly, methods and uses and medicaments include combinations of Cockroach proteins, peptides, subsequences, portions, homologues, variants and/or derivatives thereof (second, third, fourth, fifth or more), and/or second actives, and administering as a combination, or administered separately, such as concurrently or in series or sequentially (prior to or following) to administering another (second, third, fourth, fifth or more) Cockroach protein, peptide, subsequence, portios, homolog, variant and/or derivative thereof, and/or second active to a subject. The invention therefore provides combinations of one or more proteins, peptides, subsequences, portions, homologues, variants or derivatives thereof, in combination, and/or with a second active, including but not limited to any compound, agent, drug, therapeutic regimen, treatment protocol, process, remedy or composition, such as anti-histamine, anti-inflammatory, decongestant and corticosteroid, or immune tolerance stimulating, enhancing or augmenting protocol, or specific immunotherapy protocol set forth herein or known in the art. The compound, agent, drug, therapeutic regimen, treatment protocol, process, remedy or composition can be administered or performed prior to, substantially contemporaneously with or following administration of one or more proteins, peptides, subsequences, portions, homologues, variants or derivatives thereof, or a nucleic acid encoding all or a portion (e.g., a T cell epitope) of a protein, peptide, subsequence, portion, homologue, variant or derivative thereof, to a subject. Specific non-limiting examples of combination embodiments therefore include the foregoing or other compound, agent, drug, therapeutic regimen, treatment protocol, process, remedy or composition.

[0176] An exemplary combination is a Cockroach protein, peptide, subsequence, portion, homologue, variant or derivative thereof, and a different protein, peptide, or subsequence, portion, homologue, variant or derivative thereof, of an amino acid sequence of a Cockroach allergen such as a protein or peptide of Cockroach enolase, Hsp60, RACK1, TP1, trypsin, vitellogenin, Bla g 1, Bla g 1.0101, Bla g 2, Bla g 4, Bla g 5, Bla g 6, Bla g 6.0101, Bla g 6.0201, Bla g 7, Bla g 9, Bla g 11, NBGA1, NBGA2, NBGA3, NBGA4, NBGA5, NBGA6, NBGA7, NBGA8, NBGA9, NBGA10, NBGA11, NBGA12, NBGA13, NBGA14, NBGA15, or NBGA16, or a Cockroach protein or peptide set forth in any of Tables 5-8. Another exemplary combination is a protein, peptide, subsequence, portion, homologue, variant or derivative thereof, and an immunological tolerance inducing molecule.

[0177] In invention methods and uses in which there is a desired outcome or effect, such as a therapeutic or prophylactic method or use that provides a benefit from treatment, protection, inducing immunological tolerance, vaccination or specific immunotherapy, a Cockroach protein, peptide, subsequence, portion, homologue, variant or derivative thereof (e.g., a protein or peptide of Cockroach enolase, Hsp60, RACK1, TP1, trypsin, vitellogenin, Bla g 1, Bla g 1.0101, Bla g 2, Bla g 4, Bla g 5, Bla g 6, Bla g 6.0101, Bla g 6.0201, Bla g 7, Bla g 9, Bla g 11, NBGA1, NBGA2, NBGA3, NBGA4, NBGA5, NBGA6, NBGA7, NBGA8, NBGA9, NBGA10, NBGA11, NBGA12, NBGA13, NBGA14, NBGA15, or NBGA16, or a Cockroach protein or peptide set forth in any of Tables 5-8) can be administered in a sufficient or effective amount. As used herein, a “sufficient amount” or “effective amount” or an “amount sufficient” or an “amount effective” refers to an amount that provides, in single (e.g., primary) or multiple (e.g., booster) doses, alone or in combination with one or more other compounds, treatments, therapeutic regimens or agents (e.g., a drug), a long term or a short term detectable or measurable improvement in a given subject or any objective or subjective benefit to a given subject of any degree or for any time period or duration (e.g., for minutes, hours, days, months, years, or cured).

[0178] An amount sufficient or an amount effective can but need not be provided in a single administration and can but need not be achieved by a particular protein, peptide, subsequence, portion, homologue, variant or derivative thereof, alone, optionally in a combination composition or method or use that includes a second active. In addition, an amount sufficient or an amount effective need not be sufficient or effective if given in single or multiple doses without a second or additional administration or dosage, since additional doses, amounts or duration above and beyond such doses, or additional antigens, compounds, drugs, agents, treatment or therapeutic regimens may be included in order to provide a given subject with a detectable or measurable improvement or benefit to the subject. For example, to increase, enhance, improve or optimize specific immunotherapy, after an initial or primary administration of one or more proteins, peptides, subsequences, portions, homologues, variants or derivative thereof, the subject can be administered one or more additional “boosters” of one or more proteins, peptides, subsequences, portions, homologues, variants or derivatives thereof. Such subsequent “booster” administrations can be of the same or a different type, formulation, dose, concentration, route, etc.

[0179] An amount sufficient or an amount effective need not be therapeutically or prophylactically effective in each and every subject treated, nor a majority of subjects treated in a given group or population. An amount sufficient or an amount effective means sufficiency or effectiveness in a particular subject, not a group of subjects or the general population. As is typical for such methods, different subjects will exhibit varied responses to a method of the invention, such as immunization, vaccination, specific immunotherapy and therapeutic treatments.

[0180] The term “subject” includes but is not limited to a subject at risk of allergen contact or exposure as well as a subject that has been contacted by or exposed to an allergen. A subject also includes those having or at risk of having or developing an immune response to an antigen or an allergen. Such subjects include mammalian animals (mammals), such as a non-human primate (apes, gibbons, gorillas, chimpanzees, orangutans, macaques), a domestic animal (dogs and cats), a farm animal (poultry such as chickens and ducks, horses, cows, goats, sheep, pigs), experimental animal (mouse, rat, rabbit, guinea pig) and humans. Subjects include animal disease models, for example, mouse and other animal models of allergic response known in the art.

[0181] Accordingly, subjects appropriate for treatment include those having or at risk of exposure to an antigen or allergen, also referred to as subjects in need of treatment. Subjects in need of treatment therefore include subjects that have been exposed to or contacted with an antigen or allergen, or that have an ongoing contact or exposure or have developed one or more adverse symptoms caused by or associated with an antigen or allergen, regardless of the type, timing or degree of onset, progression, severity, frequency, duration of the symptoms.

[0182] Target subjects and subjects in need of treatment also include those at risk of allergen exposure or contact or at risk of having exposure or contact to an allergen. Accordingly, subjects include those at increased or elevated (high) risk of an allergic reaction; has, or has previously had or is at risk of developing hypersensitivity to an allergen; and those that have or have previously had or is at risk of developing asthma.

[0183] More particular target subjects include subjects allergic to particular Cockroach antigens and/or allergens. In particular embodiments, a subject is allergic to a Cockroach allergen, such as a Cockroach protein or peptide of Cockroach enolase, Hsp60, RACK1, TP1, trypsin, vitellogenin, Bla g 1, Bla g 1.0101, Bla g 2, Bla g 4, Bla g 5, Bla g 6, Bla g 6.0101, Bla g 6.0201, Bla g 7, Bla g 9, Bla g 11, NBGA1, NBGA2, NBGA3, NBGA4, NBGA5, NBGA6, NBGA7, NBGA8, NBGA9, NBGA10, NBGA11, NBGA12, NBGA13, NBGA14, NBGA15, or NBGA16.

[0184] Invention compositions, methods and uses and medicaments are therefore applicable to treating a subject who is at risk of allergen exposure or contact but has not yet been exposed to or contacted with the allergen. Prophylactic uses and methods are therefore included. Target subjects for prophylaxis may be at increased risk (probability or susceptibility) of allergen exposure or contact as set forth herein. Such subjects are considered in need of treatment due to being at risk.

[0185] Subjects for prophylaxis need not be at increased risk but may be from the general population in which it is desired to protect a subject against an allergic response, allergic disorder or allergic disease, or one or more physiological conditions, disorders, illnesses, diseases, symptoms or complications caused by or associated with an allergen or to provide specific immunotherapy, for example. Such a subject that is desired to be protected against an allergic response, allergic disorder or allergic disease, or one or more physiological conditions, disorders, illnesses, diseases, symptoms or complications caused by or associated with an allergen or to be provided specific immunotherapy can be administered a protein, peptide, subsequence, portion, homologue, variant or derivative thereof. In another non-limiting example, a subject that is not specifically at risk of exposure to or contact by an allergen, but nevertheless desires protection against an allergic response, allergic disorder or allergic disease, or one or more physiological conditions, disorders, illnesses, diseases, symptoms or complications caused by or associated with an allergen, can be administered a protein, peptide, subsequence, portion, homologue, variant or derivative thereof. Such subjects are also considered in need of treatment.

[0186] “Prophylaxis” and grammatical variations thereof mean a method or use in which contact, administration or in vivo delivery to a subject is prior to contact with or exposure to an allergen. In certain situations it may not be known that a subject has been contacted with or exposed to an allergen, but administration or in vivo delivery to a subject can be performed prior to manifestation of an allergic response, allergic disorder or allergic disease, or one or more physiological conditions, disorders, illnesses, diseases, symptoms or complications caused by or associated with an allergen. For example, a subject can be provided protection against an allergic response, allergic disorder or allergic disease, or one or more physiological conditions, disorders, illnesses, diseases, symptoms or complications caused by or associated with an allergen or provided specific immunotherapy with a protein, peptide, subsequence, portion, homologue, variant or derivative thereof. In such case, a method or use can eliminate, prevent, inhibit, suppress, limit, decrease or reduce the probability of or susceptibility towards an allergic response, allergic disorder or allergic disease, or one or more physiological conditions, disorders, illnesses, diseases, symptoms or complications caused by or associated with an antigen/allergen.

[0187] “Prophylaxis” can also refer to a method or use in which contact, administration or in vivo delivery to a subject is prior to a secondary or subsequent exposure to an antigen/allergen. In such a situation, a subject may have had a prior contact or exposure to an allergen. In such subjects, an acute allergic reaction may but need not be resolved. Such a subject typically may have developed anti-allergen antibodies due to the prior exposure. Immunization or vaccination, by administration or in vivo delivery to such a subject, can be performed prior to a secondary or subsequent allergen exposure. Such a method or use can eliminate, prevent, inhibit, suppress, limit, decrease or reduce the probability of or susceptibility towards a secondary or subsequent allergic response, allergic disorder or allergic disease, or one or more physiological conditions, disorders, illnesses, diseases, symptoms or complications caused by or associated with an allergen. In certain embodiments, such a method or use includes providing specific immunotherapy to the subject to eliminate, prevent, inhibit, suppress, limit, decrease or reduce the probability of or susceptibility towards a secondary or subsequent allergic response, allergic disorder or allergic disease, or one or more physiological conditions, disorders, illnesses, diseases, symptoms or complications caused by or associated with an antigen/allergen.

[0188] Treatment of an allergic reaction or response can be at any time during the reaction or response. A protein, peptide, subsequence, portion, homologue, variant or derivative thereof, can be administered as a combination (e.g., with a second active), or separately concurrently or in sequence (sequentially) in accordance with the methods and uses described herein as a single or multiple dose e.g., one or more times hourly, daily, weekly, monthly or annually or between about 1 to 10 weeks, or for as long as appropriate, for example, to achieve a reduction in the onset, progression, severity, frequency, duration of one or more symptoms or complications associated with or caused by an allergic response, allergic disorder or allergic disease, or one or more physiological conditions, disorders, illnesses, diseases, symptoms or complications caused by or associated with an antigen/allergen.

[0189] Accordingly, methods and uses of the invention can be practiced one or more times (e.g., 1-10, 1-5 or 1-3 times) an hour, day, week, month, or year. The skilled artisan will know when it is appropriate to delay or discontinue administration. A non-limiting dosage schedule is 1-7 times per week, for 1, 2, 3, 4, 5, 6, 7, 8, 9, 10, 15, 20 or more weeks.

[0190] Doses can be based upon current existing protocols, empirically determined, using animal disease models or optionally in human clinical trials. Initial study doses can be based upon animal studies, e.g. a mouse, and the amount of protein, peptide, subsequence, portion, homologue, variant or derivative thereof, administered that is determined to be effective. Exemplary non-limiting amounts (doses) are in a range of about 0.1 mg/kg to about 100 mg/kg, and any numerical value or range or value within such ranges. Greater or lesser amounts (doses) can be administered, for example, 0.01-500 mg/kg, and any numerical value or range or value within such ranges. The dose can be adjusted according to the mass of a subject, and will generally be in a range from about 1-10 ug/kg, 10-25 ug/kg, 25-50 ug/kg, 50-100 ug/kg, 100-500 ug/kg, 500-1,000 ug/kg, 1-5 mg/kg, 5-10 mg/kg, 10-20 mg/kg, 20-50 mg/kg, 50-100 mg/kg, 100-250 mg/kg, 250-500 mg/kg, or more, two, three, four, or more times per hour, day, week, month or annually. A typical range will be from about 0.3 mg/kg to about 50 mg/kg, 0-25 mg/kg, or 1.0-10 mg/kg, or any numerical value or range or value within such ranges.

[0191] Doses can vary and depend upon whether the treatment is prophylactic or therapeutic, whether a subject has been previously exposed to the antigen/allergen, the onset, progression, severity, frequency, duration, probability of or susceptibility of the symptom, condition, pathology or complication, or vaccination or specific immunotherapy to which treatment is directed, the clinical endpoint desired, previous or simultaneous treatments, the general health, age, gender, race or immunological competency of the subject and other factors that will be appreciated by the skilled artisan. The skilled artisan will appreciate the factors that may influence the dosage and timing required to provide an amount sufficient for providing a therapeutic or prophylactic benefit.

[0192] Typically, for treatment, a protein, peptide, subsequence, portion, homologue, variant or derivative thereof, will be administered as soon as practical, typically within 1-2, 2-4, 4-12, 12-24 or 24-72 hours after a subject is exposed to or contacted with an allergen, or within 1-2, 2-4, 4-12, 12-24 or 24-48 hours after onset or development of one or more of an allergic response, allergic disorder or allergic disease, or one or more physiological conditions, disorders, illnesses, diseases, symptoms or complications caused by or associated with an antigen/allergen.

[0193] For prophylactic treatment in connection with vaccination or specific immunotherapy, proteins, peptides, subsequences, portions, homologues, variants or derivatives thereof, can be administered for a duration of 0-4 weeks, e.g., 2-3 weeks, prior to exposure to or contact by an allergen or at least within 1-2, 2-4, 4-12, 12-24, 24-48 or 48-72 hours prior to exposure to or contact by an allergen. For an acute allergic reaction, proteins, peptides, subsequences, portions, homologues, variants or derivatives thereof may be administered at any appropriate time.

[0194] The dose amount, number, frequency or duration may be proportionally increased or reduced, as indicated by the status of the subject. For example, whether the subject has an allergic response, whether the subject has been exposed to or contacted by an allergen or is merely at risk of allergen contact or exposure, whether the subject is a candidate for or will be vaccinated or provided specific immunotherapy. The dose amount, number, frequency or duration may be proportionally increased or reduced, as indicated by any adverse side effects, complications or other risk factors of the treatment or therapy.

[0195] In methods and uses and medicaments of the invention, the route, dose, number and frequency of administrations, treatments, vaccinations and specific immunotherapy, and timing/intervals between treatment, vaccination and specific immunotherapy, and allergen exposure can be modified. Although rapid induction of immune responses or immunological tolerance is desired for developing protective emergency vaccines against an allergic response, allergic disorder or allergic disease, or one or more physiological conditions, disorders, illnesses, diseases, symptoms or complications caused by or associated with an allergen, in certain embodiments, a desirable treatment will elicit robust, long-lasting protection against an allergic response, allergic disorder or allergic disease, or one or more physiological conditions, disorders, illnesses, diseases, symptoms or complications caused by or associated with an allergen. Thus, in certain embodiments, invention compositions, methods and uses and medicaments provide long-lasting protection against an allergic response, allergic disorder or allergic disease, or one or more physiological conditions, disorders, illnesses, diseases, symptoms or complications caused by or associated with an allergen. Specific immunotherapy strategies can provide long-lived protection against an allergic response, allergic disorder or allergic disease, or one or more physiological conditions, disorders, illnesses, diseases, symptoms or complications caused by or associated with an allergen depending on the level of induced immunological tolerance or a T cell response or activity.

[0196] Cockroach proteins or peptides, or subsequences, portions, homologues, variants or derivatives thereof can be provided in compositions, and in turn can be used in accordance with the invention methods and uses and medicaments. Such compositions, methods and uses and medicaments include pharmaceutical compositions and formulations. In certain embodiments, a pharmaceutical composition includes one or more Cockroach proteins, peptides, subsequences, portions, homologues, variants or derivatives thereof described herein (e.g., an amino acid sequence of a Cockroach allergen such as a protein or peptide of Cockroach enolase, Hsp60, RACK1, TP1, trypsin, vitellogenin, Bla g 1, Bla g 1.0101, Bla g 2, Bla g 4, Bla g 5, Bla g 6, Bla g 6.0101, Bla g 6.0201, Bla g 7, Bla g 9, Bla g 11, NBGA1, NBGA2, NBGA3, NBGA4, NBGA5, NBGA6, NBGA7, NBGA8, NBGA9, NBGA10, NBGA11, NBGA12, NBGA13, NBGA14, NBGA15, or NBGA16, or a Cockroach protein or peptide set forth in any of Tables 5-8). In particular, aspects, such compositions and formulations may be a vaccine, including but not limited to a vaccine to protect against an allergic response, allergic disorder or allergic disease, or one or more physiological conditions, disorders, illnesses, diseases, symptoms or complications caused by or associated with an allergen (e.g., a Cockroach allergen such as a protein or peptide of Cockroach enolase, Hsp60, RACK1, TP1, trypsin, vitellogenin, Bla g 1, Bla g 1.0101, Bla g 2, Bla g 4, Bla g 5, Bla g 6, Bla g 6.0101, Bla g 6.0201, Bla g 7, Bla g 9, Bla g 11, NBGA1, NBGA2, NBGA3, NBGA4, NBGA5, NBGA6, NBGA7, NBGA8, NBGA9, NBGA10, NBGA11, NBGA12, NBGA13, NBGA14, NBGA15, or NBGA16).

[0197] As used herein the term “pharmaceutically acceptable” and “physiologically acceptable” mean a biologically acceptable formulation, gaseous, liquid or solid, or mixture thereof, which is suitable for one or more routes of administration, in vivo delivery or contact. Such formulations include solvents (aqueous or non-aqueous), solutions (aqueous or non-aqueous), emulsions (e.g., oil-in-water or water-in-oil), suspensions, syrups, elixirs, dispersion and suspension media, coatings, isotonic and absorption promoting or delaying agents, compatible with pharmaceutical administration or in vivo contact or delivery. Aqueous and non-aqueous solvents, solutions and suspensions may include suspending agents and thickening agents. Such pharmaceutically acceptable carriers include tablets (coated or uncoated), capsules (hard or soft), microbeads, powder, granules and crystals. Supplementary active compounds (e.g., preservatives, antibacterial, antiviral and antifungal agents) can also be incorporated into the compositions.

[0198] To increase an immune response, immunological tolerance or protection against an allergic response, allergic disorder or allergic disease, or one or more physiological conditions, disorders, illnesses, diseases, symptoms or complications caused by or associated with an allergen, proteins, peptides, subsequences, portions, homologues, variants or derivatives thereof, can be coupled to another protein such as ovalbumin or keyhole limpet hemocyanin (KLH), thyroglobulin or a toxin such as tetanus or cholera toxin. Proteins, peptides, subsequences, portions, homologues, variants or derivatives thereof can also be mixed with adjuvants.

[0199] Adjuvants include, for example: oil (mineral or organic) emulsion adjuvants such as Freund's complete (CFA) and incomplete adjuvant (IFA) (WO 95/17210; WO 98/56414; WO 99/12565; WO 99/11241; and U.S. Pat. No. 5,422,109); metal and metallic salts, such as aluminum and aluminum salts, such as aluminum phosphate or aluminum hydroxide, alum (hydrated potassium aluminum sulfate); bacterially derived compounds, such as Monophosphoryl lipid A and derivatives thereof (e.g., 3 De-O-acylated monophosphoryl lipid A, aka 3D-MPL or d3-MPL, to indicate that position 3 of the reducing end glucosamine is de-O-acylated, 3D-MPL consisting of the tri and tetra acyl congeners), and enterobacterial lipopolysaccharides (LPS); plant derived saponins and derivatives thereof, for example Quil A (isolated from the Quilaja Saponaria Molina tree, see, e.g., “Saponin adjuvants”, Archiv. fur die gesamte Virusforschung, Vol. 44, Springer Verlag, Berlin, p243-254; U.S. Pat. No. 5,057,540), and fragments of Quil A which retain adjuvant activity without associated toxicity, for example QS7 and QS21 (also known as QA7 and QA21), as described in WO96/33739, for example; surfactants such as, soya lecithin and oleic acid; sorbitan esters such as sorbitan trioleate; and polyvinylpyrrolidone; oligonucleotides such as CpG (WO 96/02555, and WO 98/16247), polyriboA and polyriboU; block copolymers; and immunostimulatory cytokines such as GM-CSF and IL-1, and Muramyl tripeptide (MTP). Additional examples of adjuvants are described, for example, in “Vaccine Design—the subunit and adjuvant approach” (Edited by Powell, M. F. and Newman, M. J.; 1995, Pharmaceutical Biotechnology (Plenum Press, New York and London, ISBN 0-306-44867-X) entitled “Compendium of vaccine adjuvants and excipients” by Powell, M. F. and Newman M.

[0200] Cosolvents may be added to a protein, peptide, subsequence, portion, homologue, variant or derivative thereof, composition or formulation. Non-limiting examples of cosolvents contain hydroxyl groups or other polar groups, for example, alcohols, such as isopropyl alcohol; glycols, such as propylene glycol, polyethyleneglycol, polypropylene glycol, glycol ether; glycerol; polyoxyethylene alcohols and polyoxyethylene fatty acid esters. Non-limiting examples of cosolvents contain hydroxyl groups or other polar groups, for example, alcohols, such as isopropyl alcohol; glycols, such as propylene glycol, polyethyleneglycol, polypropylene glycol, glycol ether; glycerol; polyoxyethylene alcohols and polyoxyethylene fatty acid esters.

[0201] Supplementary compounds (e.g., preservatives, antioxidants, antimicrobial agents including biocides and biostats such as antibacterial, antiviral and antifungal agents) can also be incorporated into the compositions. Pharmaceutical compositions may therefore include preservatives, anti-oxidants and antimicrobial agents.

[0202] Preservatives can be used to inhibit microbial growth or increase stability of ingredients thereby prolonging the shelf life of the pharmaceutical formulation. Suitable preservatives are known in the art and include, for example, EDTA, EGTA, benzalkonium chloride or benzoic acid or benzoates, such as sodium benzoate. Antioxidants include, for example, ascorbic acid, vitamin A, vitamin E, tocopherols, and similar vitamins or provitamins.

[0203] An antimicrobial agent or compound directly or indirectly inhibits, reduces, delays, halts, eliminates, arrests, suppresses or prevents contamination by or growth, infectivity, replication, proliferation, reproduction, of a pathogenic or non-pathogenic microbial organism. Classes of antimicrobials include antibacterial, antiviral, antifungal and antiparasitics. Antimicrobials include agents and compounds that kill or destroy (-cidal) or inhibit (-static) contamination by or growth, infectivity, replication, proliferation, reproduction of the microbial organism.

[0204] Exemplary antibacterials (antibiotics) include penicillins (e.g., penicillin G, ampicillin, methicillin, oxacillin, and amoxicillin), cephalosporins (e.g., cefadroxil, ceforanid, cefotaxime, and ceftriaxone), tetracyclines (e.g., doxycycline, chlortetracycline, minocycline, and tetracycline), aminoglycosides (e.g., amikacin, gentamycin, kanamycin, neomycin, streptomycin, netilmicin, paromomycin and tobramycin), macrolides (e.g., azithromycin, clarithromycin, and erythromycin), fluoroquinolones (e.g., ciprofloxacin, lomefloxacin, and norfloxacin), and other antibiotics including chloramphenicol, clindamycin, cycloserine, isoniazid, rifampin, vancomycin, aztreonam, clavulanic acid, imipenem, polymyxin, bacitracin, amphotericin and nystatin.

[0205] Particular non-limiting classes of anti-virals include reverse transcriptase inhibitors; protease inhibitors; thymidine kinase inhibitors; sugar or glycoprotein synthesis inhibitors; structural protein synthesis inhibitors; nucleoside analogues; and viral maturation inhibitors. Specific non-limiting examples of anti-virals include nevirapine, delavirdine, efavirenz, saquinavir, ritonavir, indinavir, nelfinavir, amprenavir, zidovudine (AZT), stavudine (d4T), larnivudine (3TC), didanosine (DDI), zalcitabine (ddC), abacavir, acyclovir, penciclovir, ribavirin, valacyclovir, ganciclovir, 1,-D-ribofuranosyl-1,2,4-triazole-3 carboxamide, 9->2-hydroxy-ethoxy methylguanine, adamantanamine, 5-iodo-2′-deoxyuridine, trifluorothymidine, interferon and adenine arabinoside.

[0206] Pharmaceutical formulations and delivery systems appropriate for the compositions, methods and uses and medicaments of the invention are known in the art (see, e.g., Remington: The Science and Practice of Pharmacy (2003) 20^{th} ed., Mack Publishing Co., Easton, Pa.; Remington's Pharmaceutical Sciences (1990) 18^{th} ed., Mack Publishing Co., Easton, Pa.; The Merck Index (1996) 12^{th} ed., Merck Publishing Group, Whitehouse, N.J.; Pharmaceutical Principles of Solid Dosage Forms (1993), Technonic Publishing Co., Inc., Lancaster, Pa.; Ansel ad Soklosa, Pharmaceutical Calculations (2001) 11^{th} ed., Lippincott Williams & Wilkins, Baltimore, Md.; and Poznansky et al., Drug Delivery Systems (1980), R. L. Juliano, ed., Oxford, N.Y., pp. 253-315).

[0207] Pharmaceutical compositions can be formulated to be compatible with a particular route of administration. Thus, pharmaceutical compositions include carriers, diluents, or excipients suitable for administration by various routes. Exemplary routes of administration for contact or in vivo delivery which a composition can optionally be formulated include inhalation, respiration, intranasal, intubation, intrapulmonary instillation, oral, buccal, intrapulmonary, intradermal, topical, dermal, parenteral, sublingual, subcutaneous, intravascular, intrathecal, intraarticular, intracavity, transdermal, iontophoretic, intraocular, opthalmic, optical, intravenous (i.v.), intramuscular, intraglandular, intraorgan, or intralymphatic.

[0208] Formulations suitable for parenteral administration include aqueous and non-aqueous solutions, suspensions or emulsions of the active compound, which preparations are typically sterile and can be isotonic with the blood of the intended recipient. Non-limiting illustrative examples include water, saline, dextrose, fructose, ethanol, animal, vegetable or synthetic oils.

[0209] Methods and uses of the invention may be practiced by any mode of administration or delivery, or by any route, systemic, regional and local administration or delivery. Exemplary administration and delivery routes include intravenous (i.v.), intraperitoneal (i.p.), intrarterial, intramuscular, parenteral, subcutaneous, intra-pleural, topical, dermal, intradermal, transdermal, transmucosal, intra-cranial, intra-spinal, rectal, oral (alimentary), mucosal, inhalation, respiration, intranasal, intubation, intrapulmonary, intrapulmonary instillation, buccal, sublingual, intravascular, intrathecal, intracavity, iontophoretic, intraocular, ophthalmic, optical, intraglandular, intraorgan, or intralymphatic.

[0210] For oral administration, a composition can take the form of, for example, tablets or capsules prepared by conventional means with pharmaceutically acceptable excipients such as binding agents (for example, pregelatinised maize starch, polyvinylpyrrolidone or hydroxypropyl methylcellulose); fillers (for example, lactose, microcrystalline cellulose or calcium hydrogen phosphate); lubricants (for example, magnesium stearate, talc or silica); disintegrants (for example, potato starch or sodium starch glycolate); or wetting agents (for example, sodium lauryl sulphate). The tablets can be coated by methods known in the art. Liquid preparations for oral administration can take the form of, for example, solutions, syrups or suspensions, or they can be presented as a dry product for constitution with water or other suitable vehicle before use. Such liquid preparations can be prepared by conventional means with pharmaceutically acceptable additives such as suspending agents (for example, sorbitol syrup, cellulose derivatives or hydrogenated edible fats); emulsifying agents (for example, lecithin or acacia); non-aqueous vehicles (for example, almond oil, oily esters, ethyl alcohol or fractionated vegetable oils); and preservatives (for example, methyl or propyl-p-hydroxybenzoates or sorbic acid). The preparations can also contain buffer salts, flavoring, coloring, and sweetening agents as appropriate.

[0211] For administration by inhalation, a composition can be delivered in the form of an aerosol spray presentation from pressurized packs or a nebulizer, with the use of a suitable propellant, for example, dichlorodifluoromethane, trichlorofluoromethane, dichlorotetrafluoroethane, carbon dioxide or other suitable gas. In the case of a pressurized aerosol, the dosage unit can be determined by providing a valve to deliver a metered amount. Capsules and cartridges for use in an inhaler or insufflator can be formulated containing a powder mix of the compound and a suitable powder base such as lactose or starch.

[0212] Invention Cockroach proteins and peptides, e.g., a protein or peptide set forth in any of Tables 5-8, subsequences, portions, homologues, variants or derivatives thereof optionally along with any adjunct agent, compound, drug, composition, whether active or inactive, etc., can be packaged in unit dosage form (capsules, tablets, troches, cachets, lozenges) for ease of administration and uniformity of dosage. A “unit dosage form” as used herein refers to physically discrete units suited as unitary dosages for the subject to be treated; each unit containing a predetermined quantity of active ingredient optionally in association with a pharmaceutical carrier (excipient, diluent, vehicle or filling agent) which, when administered in one or more doses, is calculated to produce a desired effect (e.g., prophylactic or therapeutic effect). Unit dosage forms also include, for example, ampules and vials, which may include a composition in a freeze-dried or lyophilized state; a sterile liquid carrier, for example, can be added prior to administration or delivery in vivo. Unit dosage forms additionally include, for example, ampules and vials with liquid compositions disposed therein. Individual unit dosage forms can be included in multi-dose kits or containers. Pharmaceutical formulations can be packaged in single or multiple unit dosage form for ease of administration and uniformity of dosage.

[0213] The invention also provides methods of diagnosing and detecting an allergic response or allergy in a subject. The methods can be performed in solution, in solid phase, in silica, in vitro, in a cell, and in vivo. In one embodiment, a method includes contacting a cell (e.g., T cell) from the subject with a Cockroach protein, peptide, subsequence, portion, homologue, variant or derivative thereof, as described herein (e.g., of an amino acid sequence of a Cockroach allergen such as a protein or of Cockroach enolase, Hsp60, RACK1, TP1, trypsin, vitellogenin, Bla g 1, Bla g 1.0101, Bla g 2, Bla g 4, Bla g 5, Bla g 6, Bla g 6.0101, Bla g 6.0201, Bla g 7, Bla g 9, Bla g 11, NBGA1, NBGA2, NBGA3, NBGA4, NBGA5, NBGA6, NBGA7, NBGA8, NBGA9, NBGA10, NBGA11, NBGA12, NBGA13, NBGA14, NBGA15, or NBGA16, or a Cockroach protein or peptide set forth in any of Tables 5-8; and determining if the protein or peptide modulates an immune response or activity of the contacted cell (e.g., T cell). A determination that the Cockroach protein or peptide modulates an immune response or immune activity of the contacted cell indicates that the subject has an allergic response or an allergy, in particular, an allergy to the protein, peptide, subsequence, portion, homologue, variant or derivative thereof (e.g., of a Cockroach allergen such as a protein or peptide of Cockroach enolase, Hsp60, RACK1, TP1, trypsin, vitellogenin, Bla g 1, Bla g 1.0101, Bla g 2, Bla g 4, Bla g 5, Bla g 6, Bla g 6.0101, Bla g 6.0201, Bla g 7, Bla g 9, Bla g 11, NBGA1, NBGA2, NBGA3, NBGA4, NBGA5, NBGA6, NBGA7, NBGA8, NBGA9, NBGA10, NBGA11, NBGA12, NBGA13, NBGA14, NBGA15, or NBGA16, or a Cockroach protein or peptide set forth in any of Tables 5-8). In a particular aspect, the immune activity determined is Th2 cell reactivity. In another particular aspect, immune response or activity is determined by assaying for a cutaneous immunological hypersensitive reaction.

[0214] The invention also provides methods of diagnosing and detecting allergic rhinitis or asthma in a subject. The methods can be performed in solution, in solid phase, in silica, in vitro, in a cell, and in vivo.

[0215] In one embodiment, a method of diagnosing asthma in a subject includes contacting a cell (e.g., T cell) from the subject with one or more Cockroach proteins or peptides with an amino acid sequence comprising, consisting of or consisting essentially an amino acid sequence of any of (SEQ ID NOs.: 46-203): NAIEFLNNIHDLLGI, IDDIIAILPVDDLYA, LIPVDQIIAIATDYL, QIIAIATDYLANDAE, ATDYLANDAEVQAAV, EYQNLIQKLKDKGVD, IQKLKDKGVDVDHII, DKGVDVDHIIELIHQ, DTRGLPEDLQDFLAL, LIPTDQVLAIAADYL, QVLAIAADYLANDAE, LKALFNEKLETSPDF, EYLKSDEFETIVVTV, DEFETIVVTVDSLPE, IVVTVDSLPEFKNFL, DDLQDFLALIPVDQI, PVDQIIAIATDYLAN, IAIATDYLANDAEVQ, DYLANDAEVQAAVAY, DAEVQAAVAYLQSDE, AAVAYLQSDEFETIV, VTLDALPELQNFLNF, LPELQNFLNFLEANG, HDLLGIPHIPVSGRK, IPHIPVSGRKYHIRR, VSGRKYHIRRGVGIT, PIDQILAIAADYLAN, DYLANDAEVQAAVEY, VTVDSLPEFKNFLNF, LQTNGLNAIEFINNI, LNAIEFINNIHDLLG, ATGRKHVRRGVGING, HVRRGVGINGLIDDV, VGINGLIDDVIAILP, IAILPVDELYALFQE, KLESSPEFKALYDAI, PEFKALYDAIRSPEF, LYDAIRSPEFQSIVQ, RSPEFQSIVQTLKAM, QSIVQTLKAMPEYQD, TLKAMPEYQDLIQRL, IHENLIVTSPFRPWW, FRPWWERYQLVSYNL, ERYQLVSYNLNSRSG, RCNNVGIRIYVDVVL, GIRIYVDVVLNQMSG, RGNNAIKWLVNFGVG, GASILTYKTSKLYKM, KLYKMAVAFMLAYPY, WVCEHRWRQIFNMVG, RWRQIFNMVGFRNAV, LTVFDSTSCNVVVAS, STSCNVVVASQECVG, GRGIEDSLTISNLTT, SQQDIVLADELSQEV, AVLALCATDTLANED, CATDTLANEDCFRHE, LANEDCFRHESLVPN, PYSVLATDYENYAIV, VNQHKKAIEEDLKHF, KHFNLKYEDLHSTCH, MAPSYKLTYCPVKAL, KLTYCPVKALGEPIR, FLLSYGEKDFEDYRF, GEKDFEDYRFQEGDW, PNLKPSMPFGKTPVL, QTHQSVAISRYLGKQ, VAISRYLGKQFGLSG, YLGKQFGLSGKDDWE, KDDWENLEIDMIVDT, NLEIDMIVDTISDFR, MIVDTISDFRAAIAN, ISDFRAAIANYHYDA, AAIANYHYDADENSK, YHYDADENSKQKKWD, EVVKANGGYLAAGKL, NGGYLAAGKLTWADF, AAGKLTWADFYFVAL HMAKEDLVANQPNLK, DLVANQPNLKALREK, AAKFIIEEDSEAMEK, IEEDSEAMEKELREA, EAMEKELREAFRLYD, ELREAFRLYDKEGNG, FRLYDKEGNGYIPTS, KEGNGYIPTSCLREI, YIPTSCLREILRELD, DELDMMIEEIDADGS, KALQNAESEVAALNR, RSEERLATATAKLAE, VQKLQKEVDRLEDEL, KEVDRLEDELVHEKE, EAGFAKLAASDSKSL, KLAASDSKSLLRKYL, RCGRSMQGYPFNPCL, LIDDHFLFKEGDRFL, FLFKEGDRFLQHANA, WCNEEDHLRIISMQM, QVYRRLVTAVNDIEK, RVPFSHDDRLGFLTF, HDDRLGFLTFCPTNL, CPTNLGTTVRASVRI, SPYFVTNTEKMITEF, KIGEYKNMIAEGIID, RHNSAYKLHFNAFEY, STSLVKAHSMRNSAS, AVRLSKDIAADLQGE, LVRLLKQLKVSQIME, KQLKVSQIMEAARKL, QQFISSEMVEPKEAS, KNMTYVNTSLVLAFS, QKGYMVSSMTDLWEA, NTTFSNASAVIQEFL, PAYFKMNSPSLWKYN, MNITGSINLMFSQMY, SINLMFSQMYHAQLA, FSQMYHAQLAFSTAF, FQINLDFKNHNGFIR, DVLQWQTIPYTTIHN, VPIMNIYSAFEFDPN, LRLSEHLDYVKNLTV, AKRFAKWALPLYNKP, HIVFPSYEIEMFYDG, SYEIEMFYDGSRIMI, RILLRLHRCFQVLGR, IRHAILAAGDLYSRR, QSYETKLLFDLFYYA, KLLFDLFYYANDYDT, HINEGQFLYALS SAL, QFLYALSSALFQRED, LNDYILPAPYEIYPW, EIYPWLFVDSDVIQR, LNTYYSYYYFNYPTF, SYYYFNYPTFFNSTE, DRRGEMFYYTRQQLY, MFYYTRQQLYARYFL, RQQLYARYFLERLSN, ARYFLERLSNDLPDV, QATDAYVRVFLGPKY, KELVEKYGKGKAIFI, EDAFKKAYNAFKSLD, AKGMMHMIKKGANGS, VYEVAIPDRLTLRVE, QTLFLLLLLLAAVSA, SLLLNGGCKVSNYDE, EVKIVATLKALQNAH, ISLEVLKNYQLDSEL, LKNYQLDSELRIKAF, QVGSFIVSYLRNLRA, THQFNVAGSVTVDKT, LNQEAHYQFDSIHKF, HYQFDSIHKFEFASK, KAAVHLLVAVKASKE, WVPSKKCHLTNIACL, KCHLTNIACLLHNKY, DVLDIGGLKVQKQTF, DRKMYWQFKMDKIQI or GHSHFVSDVVLSSDG, or a subsequence, portion, homologue, variant or derivative thereof, as described herein, (e.g. peptides of the Asthmas Epitope Set in Table 8) and determining if the one or more proteins or peptides modulates an immune response or activity of the contacted cell (e.g., T cell). A determination that the one or more Cockroach proteins or peptides modulates an immune response or immune activity of the contacted cell indicates that the subject has asthma.

[0216] In another embodiment, a method of diagnosing allergic rhinitis in a subject includes contacting a cell (e.g., T cell) from the subject with one or more Cockroach proteins or peptides with an amino acid sequence comprising, consisting of or consisting essentially an amino acid sequence of any of (SEQ ID NOs.: 204-256): DCGVAGFRVDAAKHM, LDYERFRGSWIIAAG, KNRTTIRGRTKFEGN, IRGRTKFEGNKFTID, KFEGNKFTIDYNDKG, ATDYENYAIVEGCPA, NYAIVEGCPAAANGH, VIYVQIRFSVRRFHP, IRFSVRRFHPKLGDK, KLGDKEMIQHYTLDQ, KAIEEDLKHFNLKYE, KTPVLEIDGKQTHQS, DENSKQKKWDPLKKE, QKKWDPLKKETIPYY, PLKKETIPYYTKKFD, TIPYYTKKFDEVVKA, TKKFDEVVKANGGYL, YFVAILDYLNHMAKE, QPNLKALREKVLGLP, ALREKVLGLPAIKAW, VLGLPAIKAWVAKRP, VLEKLEAGFAKLAAS, FGSTLLDVIQSGLEN, NDIEKRVPFSHDDRL, ALNSIQQFISSEMVE, VEALFLLMKADPSIH, DPSIHVLKMVAELTH, PKSMLLNIFTNNLGR, LNIFTNNLGRINTHV, KTLVKFVEGNLKYFN, LKYFNMGVQKFWAFD, MGVQKFWAFDNTTFS, NASAVIQEFLKTYKK, HTKLSSSSSITLTLP, SVNATVVRLQSWQSE, VVRLQSWQSEMLRMN, PRHGEQFYYFYQQIY, DYQSYRTLMRKVYDA, GQEYTFYVIVTPYAK, KAIFIKCDVTNIPEF, IVINNAGILNDEKWE, KEFANVVRVVRHTSK, RIKAFLALVECPCNK, FRKFSNNFEFSYLLG, NVIYSQNSFLPRATT, RLFGAEVGWLALHHN, LVYPTSLGFPLKLVL, SHVHFRFVPSAAVEF, KKLQFTYSESLDLDD, AQIQVVIHLDEQYIY, GVTPVFYNMVKQGLV, SEVTALNRQIGGTPI, or GKDYILRVSQLGHTV, or a subsequence, portion, homologue, variant or derivative thereof, as described herein, (e.g. peptides of the AR Epitope Set in Table 8) and determining if the one or more proteins or peptides modulates an immune response or activity of the contacted cell (e.g., T cell). A determination that the one or more Cockroach proteins or peptides modulates an immune response or immune activity of the contacted cell indicates that the subject has allergic rhinitis.

[0217] The terms “determining,” “assaying” and “measuring” and grammatical variations thereof are used interchangeably herein and refer to either qualitative or quantitative determinations, or both qualitative and quantitative determinations, that involve manipulation or processing. When the terms are used in reference to measurement or detection, any means of assessing the relative amount, including the various methods set forth herein and known in the art, performed by the hand of man, is contemplated.

[0218] The invention provides kits including Cockroach protein, peptide, subsequence, portion, homologue, variant or derivative thereof (e.g., of an amino acid sequence of a Cockroach allergen such as a protein or peptide of Cockroach enolase, Hsp60, RACK1, TP1, trypsin, vitellogenin, Bla g 1, Bla g 1.0101, Bla g 2, Bla g 4, Bla g 5, Bla g 6, Bla g 6.0101, Bla g 6.0201, Bla g 7, Bla g 9, Bla g 11, NBGA1, NBGA2, NBGA3, NBGA4, NBGA5, NBGA6, NBGA7, NBGA8, NBGA9, NBGA10, NBGA11, NBGA12, NBGA13, NBGA14, NBGA15, or NBGA16, or a Cockroach protein or peptide set forth in any of Tables 5-8), combination compositions and pharmaceutical formulations thereof, packaged into suitable packaging material. Kits can be used in various in vitro, ex vivo and in vivo methods and uses, for example a treatment method or use as disclosed herein.

[0219] A kit typically includes a label or packaging insert including a description of the components or instructions for use in vitro, in vivo, or ex vivo, of the components therein. A kit can contain a collection of such components, e.g., a Cockroach protein, peptide, subsequence, portion, homologue, variant or derivative thereof (e.g., of an amino acid sequence of a Cockroach protein or peptide of Cockroach enolase, Hsp60, RACK1, TP1, trypsin, vitellogenin, Bla g 1, Bla g 1.0101, Bla g 2, Bla g 4, Bla g 5, Bla g 6, Bla g 6.0101, Bla g 6.0201, Bla g 7, Bla g 9, Bla g 11, NBGA1, NBGA2, NBGA3, NBGA4, NBGA5, NBGA6, NBGA7, NBGA8, NBGA9, NBGA10, NBGA11, NBGA12, NBGA13, NBGA14, NBGA15, or NBGA16, or a Cockroach protein or peptide set forth in any of Tables 5-8, alone, or in combination with another therapeutically useful composition (e.g., an immune modulatory drug).

[0220] The term “packaging material” refers to a physical structure housing the components of the kit. The packaging material can maintain the components sterilely, and can be made of material commonly used for such purposes (e.g., paper, corrugated fiber, glass, plastic, foil, ampules, vials, tubes, etc.).

[0221] Kits of the invention can include labels or inserts. Labels or inserts include “printed matter,” e.g., paper or cardboard, or separate or affixed to a component, a kit or packing material (e.g., a box), or attached to an ampule, tube or vial containing a kit component. Labels or inserts can additionally include a computer readable medium, such as a disk (e.g., hard disk), optical disk such as CD- or DVD-ROM/RAM, DVD, MP3, magnetic tape, or an electrical storage media such as RAM and ROM or hybrids of these such as magnetic/optical storage media, FLASH media or memory type cards.

[0222] Labels or inserts can include identifying information of one or more components therein, dose amounts, clinical pharmacology of the active ingredient(s) including mechanism of action, pharmacokinetics and pharmacodynamics. Labels or inserts can include information identifying manufacturer information, lot numbers, manufacturer location and date.

[0223] Labels or inserts can include information on a condition, disorder, disease or symptom for which a kit component may be used. Labels or inserts can include instructions for the clinician or for a subject for using one or more of the kit components in a method, use, treatment protocol or therapeutic regimen. Instructions can include dosage amounts, frequency or duration, and instructions for practicing any of the methods and uses, treatment protocols or therapeutic regimes set forth herein. Exemplary instructions include, instructions for modulating an immune response or activity of a cell against an allergen; modulating an immune response against an allergen in a subject; desensitizing, or inducing, eliciting, increasing or improving immunological tolerance to a protein or peptide allergen; reducing risk or providing a subject protection against an allergic reaction, allergic response, allergic disorder or allergic disease; treating an allergic reaction, allergic response, allergic disorder or allergic disease; or detecting an allergic response or diagnosing an allergy in a subject (e.g., a Cockroach allergy such as to a protein or peptide of Cockroach enolase, Hsp60, RACK1, TP1, trypsin, vitellogenin, Bla g 1, Bla g 1.0101, Bla g 2, Bla g 4, Bla g 5, Bla g 6, Bla g 6.0101, Bla g 6.0201, Bla g 7, Bla g 9, Bla g 11, NBGA1, NBGA2, NBGA3, NBGA4, NBGA5, NBGA6, NBGA7, NBGA8, NBGA9, NBGA10, NBGA11, NBGA12, NBGA13, NBGA14, NBGA15, or NBGA16).

[0224] Labels or inserts can include information on any benefit that a component may provide, such as a prophylactic or therapeutic benefit. Labels or inserts can include information on potential adverse side effects, such as warnings to the subject or clinician regarding situations where it would not be appropriate to use a particular composition. Adverse side effects could also occur when the subject has, will be or is currently taking one or more other medications that may be incompatible with the composition, or the subject has, will be or is currently undergoing another treatment protocol or therapeutic regimen which would be incompatible with the composition and, therefore, instructions could include information regarding such incompatibilities.

[0225] Invention kits can additionally include other components. Each component of the kit can be enclosed within an individual container and all of the various containers can be within a single package. Invention kits can be designed for cold storage. Invention kits can further be designed to contain to the protein, peptide, subsequence, portion, homologue, variant or derivative thereof (e.g., of a Cockroach allergen such as a protein or peptide of Cockroach enolase, Hsp60, RACK1, TP1, trypsin, vitellogenin, Bla g 1, Bla g 1.0101, Bla g 2, Bla g 4, Bla g 5, Bla g 6, Bla g 6.0101, Bla g 6.0201, Bla g 7, Bla g 9, Bla g 11, NBGA1, NBGA2, NBGA3, NBGA4, NBGA5, NBGA6, NBGA7, NBGA8, NBGA9, NBGA10, NBGA11, NBGA12, NBGA13, NBGA14, NBGA15, or NBGA16, or a Cockroach protein or peptide set forth in any of Tables 5-8), or combination compositions or pharmaceutical compositions.

[0226] Unless otherwise defined, all technical and scientific terms used herein have the same meaning as commonly understood by one of ordinary skill in the art to which this invention belongs. Although methods and materials similar or equivalent to those described herein can be used in the practice or testing of the invention, suitable methods and materials are described herein.

[0227] All publications and patent applications cited in this specification are herein incorporated by reference as if each individual publication or patent application were specifically and individually indicated to be incorporated by reference. The citation of any publication is for its disclosure prior to the filing date and should not be construed as an admission that the invention is not entitled to antedate such publication by virtue of prior invention.

[0228] As used in this specification and the appended claims, the use of an indefinite article or the singular forms “a,” “an” and “the” include plural reference unless the context clearly dictates otherwise. In addition, it should be understood that the individual peptides, proteins, antigens, allergens (referred to collectively as compositions), or groups of compositions, modeled or derived from the various components or combinations of the compositions, and substituents described herein, are disclosed by the application to the same extent as if each composition or group of compositions was set forth individually. Thus, selection of particular peptides, proteins, antigens, allergens, etc. is clearly within the scope of the invention.

[0229] As used in this specification and the appended claims, the terms “comprise”, “comprising”, “comprises” and other forms of these terms are intended in the non-limiting inclusive sense, that is, to include particular recited elements or components without excluding any other element or component. Unless defined otherwise all technical and scientific terms used herein have the same meaning as commonly understood to one of ordinary skill in the art to which this invention belongs. As used herein, “about” means+ or −5%. The use of the alternative (e.g., “or”) should be understood to mean one, both, or any combination thereof of the alternatives, i.e., “or” can also refer to “and.”

[0230] As used in this specification and the appended claims, any concentration range, percentage range, ratio range or other integer range is to be understood to include the value of any integer within the recited range and, when appropriate, fractions thereof (such as one tenth and one hundredth of an integer), unless otherwise indicated. For example, although numerical values are often presented in a range format throughout this document, a range format is merely for convenience and brevity and should not be construed as an inflexible limitation on the scope of the invention. Accordingly, the use of a range expressly includes all possible subranges, all individual numerical values within that range, and all numerical values or numerical ranges including integers within such ranges and fractions of the values or the integers within ranges unless the context clearly indicates otherwise. This construction applies regardless of the breadth of the range and in all contexts throughout this patent document. Thus, to illustrate, reference to a range of 90-100% includes 91-99%, 92-98%, 93-95%, 91-98%, 91-97%, 91-96%, 91-95%, 91-94%, 91-93%, and so forth. Reference to a range of 90-100%, includes 91%, 92%, 93%, 94%, 95%, 95%, 97%, etc., as well as 91.1%, 91.2%, 91.3%, 91.4%, 91.5%, etc., 92.1%, 92.2%, 92.3%, 92.4%, 92.5%, etc., and so forth. Reference to a range of 5-10, 10-20, 20-30, 30-40, 40-50, 50-75, 75-100, 100-150, and 150-175, includes ranges such as 5-20, 5-30, 5-40, 5-50, 5-75, 5-100, 5-150, 5-171, and 10-30, 10-40, 10-50, 10-75, 10-100, 10-150, 10-175, and 20-40, 20-50, 20-75, 20-100, 20-150, 20-175, and so forth. Further, for example, reference to a series of ranges of 2-72 hours, 2-48 hours, 4-24 hours, 4-18 hours and 6-12 hours, includes ranges of 2-6 hours, 2, 12 hours, 2-18 hours, 2-24 hours, etc., and 4-27 hours, 4-48 hours, 4-6 hours, etc.

[0231] Certain abbreviations, as used in this specification and the appended claims, are defined as follows: AR: Allergic rhinitis; BLAGA: Blattella germanica allergen; IA: Intermediate asthma; MMA: Mild/moderate asthma; NBGA: Novel Bla g antigen; ORF: Open reading frame; PBMC: Peripheral blood mononuclear cells; RACK1: Receptor for activated protein kinase C; SA: Severe asthma; SFC: Spot forming cells; TG: Timothy grass; and TPI: Triosephosphate isomerase.

[0232] Although the foregoing invention has been described in some detail by way of illustration and example for purposes of clarity of understanding, it is readily apparent to those of ordinary skill in the art in light of the teachings of this invention that certain changes and modifications may be made thereto without departing from the spirit or scope of the appended claims. The invention is further exemplified by way of the following non-limited examples.

[0233] The invention is further exemplified by way of the following non-limited examples.

### EXAMPLES

### Example 1

[0234] This example includes a description of various materials and methods.

[0235] Study Subject Populations:

[0236] Subjects displaying symptoms of allergic rhinitis were recruited from St. Louis, New York City, Boston, and Cleveland clinics, following Institutional Review Board approved protocols and informed consent. Each was assigned a study identification number. Subjects with a skin prick test (wheal ≥3 mm) and IgE titers toward Bla g extract (≥0.35 kUA/L by ImmunoCAP assay) were classified as Bla g sensitized. Otherwise, individuals with negative skin prick tests and negative IgE titers were classified as controls. Subjects were further classified as allergic rhinitis and no asthma (AR), intermittent asthma (IA), mild/moderate asthma (MMA), or severe asthma (SA)) by clinical history, questionnaires, and medication scores. Asthma or allergic rhinitis status was based on having either 1) diagnosis by a doctor over 1 year before recruitment, or 2) meeting specific symptom criteria if no diagnosis or a recent diagnosis. Asthma severity classifications were based on current controller medication requirements and use of prednisone in the last year. Cockroach-sensitive individuals who were screened and did not meet these criteria were not enrolled.

[0237] Pertinent subject information is summarized in Table 3. In addition, a group of ten non-allergic donors (no allergic rhinitis symptoms and non Bla g sensitized) recruited in the San Diego area were included as non-allergic controls.

[0238] Generation of Bla g Transcriptome:

[0239] Blattella germanica females used for the whole transcriptome analysis were obtained from a colony reared at the Institut de Biologia Evolutiva (CSIC-UPF) at 30° C. and 70% humidity, supplied with water at libitum and a commercial dog food diet. The whole transcriptome was analyzed in three different tissues, fat body, ovary, and epidermis. Fat body and ovaries were taken from 3-day-old to 5-day-old adults, while the epidermis was obtained from the thoracic dorsum of 5-day-old and 6-day-old 6^{th} instar nymphs. Three animals were used to pool ovary and epithelium, and five were necessary to pool the fat body. Total RNA was extracted with the GenElute™ Mammalian Total RNA Miniprep Kit (Sigma-Aldrich). RNA samples were sent to be sequenced at GATC-Biotech (Konstanz, Germany) by Roche™ pyrosequencing technology (454), a method of choice for generating library data from those species without genome annotated^{30,31}, as it provides large reads that facilitates the de novo assembly. Data from the four libraries are accessible at the GEO database (accession code GSE63921).

[0240] Proteomic Analysis of Bla g Extract:

[0241] Novel Bla g antigens were identified as described in Schulten, et al 2013 for TG. Briefly, Bla g extract (Greer, cat#XPB46D3A4) and pooled sera from 15 Bla g allergic subjects were submitted to Applied Biomics for analysis. 2-D gels (3-10 pH range, 12% (vol/vol) acrylamide) of Bla g extract were incubated with the pool of sera and stained with goat anti-human IgE and rabbit anti-human IgG (Sigma-Aldrich), and visualized by using Cy2-conjugated donkey anti-goat IgG and Cy5-conjugated donkey anti-mouse IgG antibodies (Biotium). This was followed by mass spectrometry analysis of positive IgE and/or IgG protein spots and MALDI spectra were compared against the Bla g transcriptome, using MASCOT. 16 unique novel potential ORFs were identified (Table 4). A more detailed description of proteomic identification is in Supplementary Methods.

[0242] Peptide Synthesis and MHC Class II Binding Predictions:

[0243] 809 15-mer peptides overlapping by 5 residues were synthesized covering Bla g allergens, Bla g 1-9 and 11. In addition, from the proteomic identified sequences, 646 15-mer peptides with predicted promiscuous binding to MHC class II alleles were selected as described (Paul et al, submitted) and synthesized. Finally, 233 promiscuous binding 15-mer peptides from recently identified antigens (vitellogenin, Hsp60, enolase, triosephosphate isomerase (TPI), trypsin, and RACK1) were synthesized. In total, 1514 15-mer peptides were synthesized for epitope identification (Table 5). A more detailed description of binding prediction and peptide synthesis is in Supplementary Methods.

[0244] PBMC Isolation and Cell Cultures:

[0245] PBMC (peripheral blood mononuclear cells) were isolated from 450 mL (one unit) of blood by density gradient centrifugation as described and cryopreserved. For in vitro expansion of PBMC for peptide screening, cells were cultured in RPMI1640 (Omega Scientific)+5% human AB serum (Gemini Bioscience), GlutaMAX (Gibco), and penicillin/streptomycin (Omega Scientific) at 2×10⁶ per mL, stimulated with 10 ug/mL Bla g extract (Greer), and incubated at 37° C. in 5% CO₂. Every three days, IL-2 and IL-7 (10 U/mL) were added to the cultures. Cells were harvested for peptide screening at day 14.

[0246] ELISPOT Assays:

[0247] Production of IFNγ, IL-5, IL-17, IL-10, and IL-21 (as representative of T_{H}1, T_{H}2, T_{H}17, T_{R}1, and T_{FH}, respectively) in response to peptide stimulation was measured by ELISPOT as described previously. Antibodies used in ELISPOT were (coating and secondary, respectively): for IFNγ/IL-5 dual plates: anti-IFNγ clone 1-D1K and anti-IL-5 clone TRK5, anti-IFNγ-HRP clone GZ-4 and anti-IL-5-biotin clone 5A10; for IL-10/IL-17 dual plates: anti-IL-10 clone 9D7 and anti-IL-17 clone MT44.6, and anti-IL-10-ALP clone 12G8 and anti-IL-17-biotin clone MT504; for IL-21 single plates: anti-IL-21 clone MT21.4/821 and anti-IL-21-biotin clone MT21.3m (all from Mabtech). In brief, 1×10⁵ cells per well were incubated with peptide, peptide pool, or Bla g extract (10, 5, and 10 ug/ml, respectively) on anti-lymphokine antibody coated ELISPOT plates (Millipore #MSIPS4510) for 22 hours. Subsequently, secondary anti-lymphokine antibodies were added and incubated for 2 hours, washed, and avidin-peroxidase complex added for 1 hour. Plates were washed and spots developed with 3-amino-9-ethylcarbazole (Sigma #A6926) and Vector Blue (Vector #SK-5300) for IFNγ/IL-5 and IL-10/IL-17 dual plates or TMB (Sigma #T0565) for single IL-21. Criteria for peptide pool positivity were at least 100 spot forming cells (SFC) per 10⁶ PBMC, p≤0.05, and stimulation index ≥2. Criteria for peptide positivity were identical except with a threshold of 20 SFCs.

### Example 2

[0248] This example includes a description of various Supplementary materials and methods.

[0249] Identification of Novel Bla g Extract Proteins:

[0250] To identify IgE and IgG reactive proteins from whole Bla g, a cockroach extract sample was run on two 2-D gels [3-10 pH range, 12% (vol/vol) acrylamide] followed by MS analysis of individual proteins spots (performed by Applied Biomics). One gel was stained with Coomassie blue, and the other was blotted onto a nitrocellulose membrane. The membrane was then incubated with 5% dried milk in PBS/0.05% Tween to block nonspecific binding, and subsequently probed with serum pooled from five Bla g-sensitive individuals at a dilution of 1:250. IgE and IgG binding were detected using goat anti-human IgE and rabbit anti-human IgG (Sigma-Aldrich), and visualized by using Cy2-conjugated donkey anti-goat IgG and Cy5-conjugated donkey anti-mouse IgG antibodies (Biotium).

[0251] Spots recognized by IgG, IgE, both or neither, were selected from the 2D blot, and the corresponding spots were identified on the stained SDS gel, cut out, and washed several times to remove staining dye and other inhibitory chemicals. To ensure that the correct spots were identified on the unstained gel, all gels (gel that was blotted, gel that was stained with Coomassie, and the unstained gel from which the spots were eventually picked) were run at the same time and under the exact same conditions to allow the assumption that the proteins run in the same x-y positions of the gels. Furthermore, for the spots selected from the blot, specialized software was used. Proteins on both the Western blot and the unstained gel were labeled with CyDye, which the software was able to align to ensure that the automated spot picker selected the right spots.

[0252] Spots were then dried to absorb maximum digestion buffer. Dried 2D gel spots were rehydrated in digestion buffer containing trypsin. Proteins were digested in gel at 37° C. and then extracted from the gel with TFA extraction buffer. Subsequently, the peptides were desalted by using C-18 Zip-tips, (Millipore) mixed with an α-cyano-4-hydroxycinnamic acid matrix, and spotted into wells of a MALDI plate. Mass spectra of the peptides in each sample were obtained by using an Applied Biosystems Proteomics Analyzer.

[0253] Generation of Putative Protein Transcripts for Epitope Predictions:

[0254] In parallel, we obtained transcripts from Bla g mRNA that had been deep-sequenced by X. Belles (Institute of Evolutionary Biology, Barcelona Spain). Freshly ecdysed sixth (last) instar nymphs and adult females of the Bla g were obtained from a colony reared in the dark at 30±1° C. and 60-70% relative humidity. For the WB-6 samples, the entire animal except the head (to avoid interferences with the eye pigments) and the digestive tube (to avoid contamination with parasites) was used. Stage specific samples of 2-3 individuals were collected for each of the 9 days of the last instar nymph. Then a pool composed by day 0 to 8 aliquots was built in order to cover the entire last instar nymph. For the Ov-A samples, we dissected the ovary pair from adult virgin cockroaches in each day of the first gonadotrophic cycle, which lasts 8 days. The pooling procedure to get an extract covering in this case the whole first gonadotrophic cycle was equivalent to that followed in the WB-6 extract. All dissections and tissue sampling were carried out on carbon dioxide-anaesthetized individuals. RNA isolation from WB-6 and Ov-A samples was carried out with mirVana miRNA Isolated kit (Ambion), which increases the yield of small RNAs. The total amount of RNA in WB-6 and Ov-A samples was approximately 10 μg. Sequencing was performed on an Illumina Genome Analyzer with Solexa technology.

[0255] The spectra were compared with the amino acid sequences encoded by the longest putative ORFs from the each of the de novo-assembled cockroach transcripts. All ORFs that had a >95% confidence hit as evaluated by the Mascot software package (Matrix Science) were considered hits. The amino acid sequences encoded by these ORFs were used for epitope prediction.

[0256] Epitope Prediction from Bla g Proteins:

[0257] Next the novel sequences were analyzed to predict HLA class II promiscuous binders. Protein ID details (total protein IDs count=95) were narrowed to consider only protein details with “high confidence” (76 entries), and further narrowed by removing duplicate accession numbers. The remaining 37 sequences were clustered using Epitope Cluster Analysis tool available through the IEDB Analysis Resource (http://tools.immuneepitope.org/tools/cluster/iedb_input) and BLAST 2 Sequences at NCBI (www.ncbi.nlm.nih.gov/blast/bl2seq/wblast2.cgi). The longest sequence in each cluster was considered as the reference sequence for the particular cluster and all other sequences in the cluster were aligned to the reference sequence using MEGA (http://megasoftware.net/). All sequences in each cluster were >60% identical to the respective reference sequence with >75% sequence coverage. A total of 19 unique clusters were obtained.

[0258] Next, each cluster was compared to known allergens from allergen.org. Cluster-8 was found to correspond to the known allergen Bla g 7, and was thus excluded from further analysis. Cluster-2 was 53% identical out of 96% coverage to the Per a 3 allergen from Periplaneta americana (American cockroach) & 51% identical out of 95% coverage to Bla g 3. However, as Bla g 3 has not been previously characterized (and is not present in allergen.org), Cluster-2 was retained in the analysis.

[0259] Each of the 18 remaining clusters was subjected to BLAST analysis at GenBank to identify similar proteins, and the best hit was noted. The 6 known Bla g allergens (1, 2, 4, 5, 6, 7) were included as a control set. To generate 15-mers for all protein clusters separately we generated 15-mer peptides overlapping by 10 residues, starting at position 1, and included a peptide covering the C-terminus. For example, for a 27-residue protein peptides 1-15, 6-20, 11-25 and 13-27 would be selected. For Clusters-1 and -2, all 15-mers from the reference sequence (longest sequence+other sequences at the ends if applicable) were included and additionally the 15-mers from other proteins of the same cluster that had 2 or more amino acid substitutions were also included. We removed 15-mers with ‘X’ (3 from Cluster-16, 3 from Cluster-18 and 2 from Cluster-19).

[0260] To characterize the predicted HLA class II binding capacity of each peptide, we selected 24 common alleles for which algorithms were available. The MHC binding affinity for all 15-mers for each allele was generated using the stand-alone version of IEDB's MHC class II epitope prediction tool. Each allele was predicted independently using the IEDB's recommended approach, which for all alleles except DRB3*02:02 was the consensus method; for DRB3*02:02, where nn_align & smm_align methods are currently not available, the IEDB recommended is NetmhcIIpan. For each 15-mer, the number of alleles with an IEDB percentile score ≤20 was tabulated as a measure of promiscuity. All 15-mers predicted at the 20^{th} percentile for 12 or more alleles (i.e., ≥50% of the total no. of alleles considered) were considered promiscuous binders. For clusters that had less than 5 15-mers at the above threshold, the selection threshold was lowered so as to include at least 5 15-mers from each cluster.

[0261] To ensure that each allergen is adequately represented in the final selected peptide set, the number of peptides for each protein cluster was determined after excluding peptides located within the first 20 residues of the N-terminus (which likely contain signal sequences) as well as redundancy from directly overlapping peptides (e.g., for peptides spanning 56-70 and 61-75, only the one with the highest predicted promiscuity was selected). Cluster-18 had only one valid peptide as per these criteria while all others had greater than or equal to 2 peptides. Accordingly, the selection threshold for Cluster-18 was also lowered until an additional peptide was identified; thereby ensuring that in the final selection at least 2 peptides from each cluster was included. In total, a final set of 318 predicted binders was selected from the novel allergen set, and synthesized as crude material on the 1 mg scale.

[0262] Epitope prediction from recent Bla g sequences from literature: Following a methodology similar to that described above, 15-mers were generated to span each of 8 novel Bla g antigens from both references (i.e., 2 from Jeong and 6 from Chuang)^{11,17}, as per standard protocol after aligning the sequences with previously identified proteins. We next predicted binding affinity for all 15mers for 24 class II alleles as above (Section 4). For all 15-mers the number of alleles with an IEDB percentile score ≤20 was tabulated as a measure of promiscuity. All 15-mers with 12 or more alleles (50% of the total no. of alleles considered) predicted at that threshold were selected as candidate promiscuous binders (n=178). Further analysis identified that 110 of these peptides were already present in sets of previously selected binders. After removal of these redundant peptides, final set of 68 new promiscuous binders was selected for further analysis. Of these 68, 8 are variants of the previously predicted binders. All 8 novel antigens identified in the Jeong and Chuang studies were represented by at least 5 15-mers in the final set of 68 selected peptides (and all 8 antigens were represented by more than 2 15-mers after exclusion of signal sequence region and directly overlapping 15-mers). These peptides were also synthesized as crude material on the 1 mg scale (3561 series).

### Example 3

[0263] This example includes a description of study design for immunological characterization of Bla g allergens.

[0264] To characterize reactivity of Bla g sensitized subjects as a function of disease severity, we assembled a cohort of 90 subjects adult study participants, recruited from St Louis, New York City, Boston, and Cleveland (Table 3). Each donor provided a unit blood donation and was classified as Bla g sensitized (Bla g IgE titer ≥0.35 kUA/mL and skin prick test wheal ≥3 mm) or as control (≤0.35 Bla g IgE titer and skin prick test). Sensitized individuals were classified as allergic rhinitis and no asthma (AR), intermittent asthma (IA), mild/moderate asthma (MMA), or severe asthma (SA) based on clinical history, questionnaires, and medication scores. These subjects were 77% female and ranged in age from 19 to 56.

[0265] We synthesized overlapping peptide sets of 15 amino acids in length overlapping by 10 residues and covering the entire sequence of known Bla g Allergens, i.e. Bla g 1-7, 9 and 11, referred from hereafter collectively as BLAGA. A total of 809 BLAGA peptides were arranged in pools, encompassing on average 20 peptides.

### Example 4

[0266] This example includes a description of differential immune reactivity and immunodominance against Bla g allergens in sensitized versus non-sensitized controls.

[0267] To assess T cell reactivity, we utilized a strategy applied to the definition of epitopes from various allergen sources^{15,16} utilizing in vitro stimulation with allergen extracts. Here, PBMC from each subject were stimulated in vitro with Bla g extract. After 14 days, pools of overlapping 15-mer peptides from the BLAGA were tested for responses, and positive pools deconvoluted to identify the specific epitopes. As readout, we utilized ELISPOT assays specific for IL-5, IFNγ, IL-10, IL-17 and IL-21, chosen as representative of T_{H}2, T_{H}1, T_{R}1, T_{H}17 and T_{FH} reactivity, respectively.

[0268] FIG. 1A, depicts for each subject the overall response (expressed as total SFC/10⁶ PBMC for all BLAGA and for all cytokines). Vigorous T cell responses were detected against BLAGA in Bla g sensitized donors. As expected, the non-Bla g sensitized controls were associated with lower responses.

[0269] In the sensitized donors, Bla g 5, Bla g 4, Bla g 9 and Bla g 11 were immunodominant (FIG. 1B). In the non-Bla g sensitized controls Bla g 4 and 9 still relatively imunodominant, while Bla g 5 and Bla g 11 were hardly recognized at all.

[0270] As expected, the most dominant cytokine detected in Bla g sensitized individuals was IL-5 (FIG. 1C), followed by IL-10 and IFNγ. The levels of IL-5, IFNγ, and IL-10 were significantly lower in non-sensitized controls, and in fact IL-10 secretion in response to BLAGA was not detected in the control subjects. Lower levels of IL-17 and IL-21 were also detected, not significantly different between sensitized and control individuals.

### Example 5

[0271] This example includes a definition of novel Bla g T cell antigens.

[0272] In the studies described above, 44% of sensitized subjects responded to extract stimulation but did not respond to any of the BLAGA peptides (data not shown). This suggested that additional uncharacterized antigenic proteins are present in the extract, in addition to the ten BLAGA commonly described.

[0273] Schulten et al recently described how novel T cell antigens can be discovered by a proteomic approach combined with HLA-binding predictions^{16,32} The same approach was utilized here to identify potential novel Bla g antigens. To this end, transcripts from Bla g mRNA were deep-sequenced. Subsequently, 2-D gels of Bla g extract followed by mass spectrometry analysis of individual protein spots and MALDI spectra of the peptides from these spots were used to derive sequences (FIG. 2). These transcripts along with the MALDI-derived peptide sequences were assembled in 16 unique novel potential ORFs, referred to hereafter as NBGA 1-16 (Novel Bla g Antigens; Table 4 and 7). Independently using similar proteomic techniques, Jeong and colleagues^{11,33} and Chuang and colleagues^{16,17} identified additional NGBA, including Enolase, Hsp60, RACK1, TPI, Trypsin and Vitellogenin. In total, these studies defined 22 different NBGA, 7 of which were non-IgE reactive, and 15 of which had IgE reactivity as defined by the immunoblot analysis of FIG. 2 and the Jeong and Chuang studies^{11,17} These sequences were scanned for predicted promiscuous HLA class II binding peptides using a prediction scheme previously described¹⁶. A total of 879 peptides were selected for synthesis.

### Example 6

[0274] This example includes data demonstrating that NBGA induce a substantial proportion of total T cell responses.

[0275] To determine if NBGA were targeted by T cell responses in sensitized subjects, cytokine release in response to each peptide, following 2-week in vitro extract stimulation was measured in similar fashion to FIG. 1. A total of 13 NBGA were associated with detectable levels of cytokine release in more than one subject (FIG. 3A). The novel antigen, NBGA1, dominated the response (FIG. 3A), accounting for approximately half of total NBGA response. Significant reactivity was also observed for several other antigens, including NBGA2-5, NBGA7, TPI and RACK1. By contrast, ten other antigens (NBGA8-16 and vitellogenin) were essentially negative for any cytokine specific responses.

[0276] As in the case of the BLAGA responses, different immunodominance patterns were observed in the controls as compared to the sensitized individuals. For example, NBGA1 was recognized as dominant in both sensitized and controls, while NBGA7 was essentially recognized only in sensitized individuals.

[0277] Remarkably, most of the reactivity of sensitized subjects was encompassed by IgE+ NBGA (shown in the left of FIG. 3A), while, with exception of the NBGA5, IgE-NBGA (shown in the right of FIG. 3A) were essentially negative. IgE+ NBGA reactivity for all cytokines was stronger compared to IgE-NBGA (FIG. 3B). IL-5 encompassed the majority of the response, but IFNγ, IL-10, IL-17, and IL-21 responses were also detected. Non-sensitized control subjects also preferentially recognized IgE+ NBGA, but with lower magnitudes than sensitized individuals (FIG. 3B). In conclusion, the data presented in this section demonstrate that significant T cell reactivity is associated with NGBA antigens, mostly directed to IgE+ positive antigens.

### Example 7

[0278] This example includes data demonstrating breadth and immunodominance at the epitope level.

[0279] Overall, a total of 465 peptides were recognized in at least one of the subjects. Many of these peptides overlap each other and as such likely to encompass the same epitope. The data was examined next to eliminate redundancy and overlaps, as described in the methods section. Accordingly, a set of 356 non-redundant epitopes was derived.

[0280] The patterns of immunodominance and breadth of responses at the level of individual epitopes are shown in FIG. 4. A total of 56% of the sensitized subjects recognized at least one BLAGA epitope. Combining BLAGA and NBGA epitopes increased the percentage of subjects responding to at least one epitope to 79% (FIG. 4A). Thus, combined use of epitopes derived from BLAGA and NBGA accounts for coverage of a larger percentage of Bla g sensitive individuals than would be possible with either antigen class alone.

[0281] Overall, 50% of the subjects recognized 6 peptides or more (FIG. 4A). To account for 90% of the total response 164 epitopes, were required and 23 epitopes were required to capture 50% of the responses (FIG. 4B). A list of these 164 epitopes, and the corresponding average magnitudes and response rates, is provided in Table 6. Overall, these data underline the remarkable breadth of responses detected in sensitized donors, and clearly points to the value of a systematic epitope identification effort, to allow comprehensive coverage of the patient population and examination of the pattern of immune recognition associated with each individual subject.

### Example 8

[0282] This example includes data demonstrating that polarization of T cell responses correlates with sensitization status, while magnitude of T cell responses correlate with Asthma status.

[0283] In the next series of analyses, we correlated magnitude and functionality of T_{H} subset responses with the sensitization and asthma status as defined above. In terms of magnitude of responses, a geometric mean magnitude of 251 SFC/10̂6 cells was noted in non-sensitized controls (FIG. 5). The magnitude of responses progressively increased in AR subjects (491 SFC), patients with IA (605 SFC), and MMA (1786 SFC, p<0.05 to controls). Responses were somewhat lower in SA (1134 SFC), although still significantly higher than the control group, perhaps reflective of the immunosuppressive nature of medications administered to the SA group.

[0284] In terms of polarization of T cell responses, similar to what was observed for TG^{16,18} allergy, the cytokine patterns observed in Bla g allergic patients was highly polarized, with responses in all allergic subjects being dominated by IL-5, and accounting for ⅔ of the response across all groups. This pattern was similar regardless of the AR versus asthma status of the sensitized donors. By contrast, the T cell response in control subjects was not highly polarized, with similar amounts of IL-5 (32%), IFNγ (21%) and IL-10 (25%) being detected. Thus, the sensitization status correlated with increased IL-5 polarization of responses to Bla g antigens while the AR versus Asthma status correlated with increased magnitude of response.

### Example 9

[0285] This example includes data showing differential immunodominance of BLAGA and NBGA in control, rhinitis and asthmatic subjects.

[0286] We next investigated the immunodominance patterns for BLAGA and NBGA antigens (FIG. 6 and Table 1). Table 1 lists, for each antigen and subject category, the percentage of subjects responding and the average total response/donor associated with each particular antigen. FIG. 6 shows the same data in a pie chart format, in which the study subjects were divided in non-sensitized controls, sensitized non-asthmatics, and sensitized asthmatics. We expected, based, on the data shown in FIGS. 1 and 3, that a different pattern of immunodominance would be observed between sensitized and non-sensitized individuals.

[0287] In non-sensitized controls >70% of the total response was encompassed by the two antigens, Bla g 9 and NBGA1 (FIG. 6A and Table 1). In subjects with allergic rhinitis (FIG. 6B and Table 1). NBGA1 still encompassed a significant proportion of the response (21.3%), however Bla g 4 was the most dominant (31.8% of response), and the response to Bla g 5 (21.6%) was equivalent to that seen in NBGA1 (21.3%).

[0288] Intriguingly, the pattern further shifted in the sensitized asthmatic donors (FIG. 6C and Table 1). Bla g 5 and NBGA1 still accounted for large proportions of the response (32.7% and 11.9%, respectively), but responses to Bla g 4 were nearly absent (1.6%). Responses to Bla g 9 increased to 24.4%, and Bla g 11, which had very low responses in controls and rhinitis, increased to 8.1%.

[0289] Remarkably, Bla g 2, which is a dominant target of IgE responses along with Bla g 5, accounted for only a minor fraction (<1%) of T cell reactivity among both rhinitis and asthmatic subjects, highlighting the lack of correlation between immunodominance for IgE and T cell responses, in agreement with what has been previously reported in other allergies^{15,18}.

[0290] When the pattern of responsiveness amongst different asthma severity was considered, some further minor differences were observed. For example, NBGA1 and 7 seemed to be recognized most prominently in IA subjects (Table 1), but overall similar patterns were observed in the different categories of asthmatic patients.

### Example 10

[0291] This example includes data showing differential epitope recognition as a function of disease state.

[0292] Based on the above results, which showed differential patterns of relative immunodominance in sensitized and control individuals on one hand and asthmatic versus non-asthmatic subjects on the other hand, we hypothesized that the epitopes identified could be partitioned in sets associated with preferential recognition by specific patient groups.

[0293] The results of this in silico analysis shown in Table 2, define a set of 55 epitope sequences (Rhinitis Set in Table 2) accounting for 84% of the total response in the rhinitis subjects, but only 20% of the response of asthmatic subjects. Similarly, an epitope set of 147 epitopes (Asthmatic Set) could be defined, associated with preferential recognition (55% of total response) in Bla g sensitized subjects with asthma, but recognized in lower frequencies in rhinitis subjects (5%).

### Example 11

[0294] This example includes data showing differential recognition of disease specific epitope pools.

[0295] We next validated the specificity of recognition for putative disease-state epitope sets. Randomly selected subjects from the AR and asthmatic groups were cultured in vitro for 14-days in the presence of epitope pools, followed by overnight restimulation with the respective epitope sets described in Table 2. After a 14-day in vitro restimulation as above, responses against the epitope sets were measured. Responses were measured by ELISPOT, and the relative and absolute IFNγ, IL-5, IL-10, IL-17, and IL-21 responses were calculated.

[0296] As seen in FIG. 7A the median percentage of responses of asthmatic subjects was highest in response to the Asthma Pools and decreased in the case of the Rhinitis Pools. In fact, for ten of 14 asthmatic subjects the largest proportion (>40%) of the response was directed to the Asthma Pools. Conversely, the responses observed in the AR (sensitized but non-asthmatic) subjects were dominated by the Rhinitis Pools (FIG. 7B). In fact, for five of the nine AR subjects the largest proportion (>40%) of response was directed to the Rhinitis Pools, Results were similar when the absolute magnitude of responses, rather than the relative magnitudes were plotted (FIGS. 7C-D). Similar trends were also noted when cultures were restimulated with extract followed by assay with the various peptide pools. In this case, the response rate for control and rhinitis subjects was much lower (data not shown), indicating that stimulation with high concentration of well-defined epitopes provides stronger stimulus. Overall the data suggest that these epitope pools could have potential applications to differentiate between Bla g sensitized rhinitis and asthmatic subjects.

### Example 12

[0297] The following is a discussion of the data herein.

[0298] In this study, a thorough characterization of the CD4⁺ T cell responses in cockroach allergy is provided, at the level of the antigens and epitopes recognized, at the level of the functionality of associated T cell responses, and as a function of sensitization and asthmatic status. We determined if a differential “signature” would be associated with controls versus rhinitis only patients, and versus asthmatics. Surprisingly, differences in terms of antigens dominantly recognized in Bla g sensitized subjects with and without asthma, and also versus control subjects were observed. This represents the first report of differential recognition between asthmatics and non-asthmatics of T cell antigens in respiratory allergens in general and Bla g sensitized individuals in particular.

[0299] The study overall investigated the reactivity of approximately 1,600 different Bla g derived synthetic peptides. While over 400 peptides were associated with some measurable T cell responses, and a total of 164 different epitopes were recognized in multiple donors, and 23 of them accounted for 50% of the total response.

[0300] Previous to the studies herein, the nature of human T cell epitopes had not been systematically investigated in this system and only 30 Bla g T cell epitopes were described¹⁵. Accordingly, the studies herein expanded by more than an order of magnitude the number of epitopes available for study.

[0301] At the antigen level, the whole sequence of all classically defined Bla g allergens, Bla g 1, 2, 4-7, 9 and 11 was systematically investigated. These Bla g allergens only accounted for responses in 56% of Bla g sensitized individuals. To find the “missing” responses, transcriptomic/proteomic approach with Bla g extract and sensitized serum was employed. In Bla g extract, 16 novel antigens that had IgE and/or IgG reactivity in Bla g sensitized serum were identified. These novel antigens induced T cell responses in 43% of Bla g sensitized subjects, and the combined sets of Bla g and novel antigens were recognized by more than 79% of subjects.

[0302] Intriguingly, in direct contrast to what was detected for TG allergy, the non-IgE reactive antigens in Bla g extract had negligible T cell activity in all CD4⁺ subsets, suggesting a strong link between IgE and T cell activity in Bla g allergy. It is not apparent why different allergen species would have different patterns in IgE:T cell linkage at the antigen level. One possibility is that the T cell responses to TG epitopes from antigens that are not targeted by IgE are actually cross-reactive T cell responses specific for antigens from other pollen species that are targeted by IgE. Indeed, many TG epitopes show high cross-reactivity to other grass pollens. For Bla g antigens, a lesser degree of exposure to homologous antigens from other species may explain the stronger T cell:IgE linkage observed.

[0303] These data highlights how the combined transcriptomic/proteomic approach can expand the number of antigens associated with T cell reactivity. Given the fact that some of the sensitized donors which responded to extract did not see any of the known and novel proteins, it is likely that additional targets remain to be identified, which is also not completely surprising given the large number of proteins transcribed by the cockroach genome.

[0304] Certain allergens known to be dominant in terms of IgE responses, such as Bla g 2 was the target of only less than 4% of the total CD4⁺ T cell response to the Bla g antigens. Conversely other allergens less dominant at the IgE level, such as Bla g 9 and Bla g 4, and a novel antigen NBGA1 were immunodominant for T cell responses, accounted cumulatively for more than 75% of the response, similar to other reports^{15,34} The NBGA5 antigen was fairly prominently recognized at the T cell level, despite not being targeted by IgE responses and would thus represent a potential candidate for safer T cell specific immunotherapy regimens.

[0305] Overall, the data suggests that Specific Immunotherapy approaches aimed at modulating T cell responses might not need to target the most dominant IgE binding proteins. Indeed, targeting the most dominant T cell antigens that are less prominent in terms of IgE binding might offer an effective and safer immunotherapeutic approach.

[0306] In terms of functionality and magnitude of T cell responses, as expected, the responses of non-sensitized donors were weaker and not effectively polarized. In the sensitized donors, the majority of the response was polarized to the T_{H}2 subset, but significant responses were also detected for lymphokines associated with T_{H}1, T_{H}17, T_{R}1, and T_{FH} subsets. However in contrast to other reports on the correlation between T_{H}17 responses and asthma²⁴, the relative contribution of IL-17 response to Bla g antigens was equivalent between AR and asthmatic groups. The magnitude of responses was progressively increased in AR subjects, IA, and MMA. Responses were somewhat lower in SA group, although still significantly higher than the control group, perhaps reflective of the immunosuppressive nature of medications administered to the SA group.

[0307] The observed preferences in antigen recognition associated with clinical status, with the extensive epitope identification, was utilized to develop epitope sets that could differentiate between rhinitis and asthmatic subjects. These epitope sets could be used to isolate the corresponding allergen-specific cells and examining whether differences might exist at the level of their transcriptional or epigenetic profiles, or whether changes in the associated signatures might precede or follow the evolution of allergic disease, or asthma remission or exacerbation. In a broader sense, these epitope sets may have diagnostic value in providing a standardized laboratory test of asthmatic status.

TABLE 1
Differential Immunodominance of Bla g Antigens as a Function of Allergic Clinical
Status.

| | Controls | | AR | | Asthmatic | | IA | | MMA | | SA | |
|---|---|---|---|---|---|---|---|---|---|---|---|---|
| Antigen | % | SFC | % | SFC | % | SFC | % | SFC | % | SFC | % | SFC |
| Bla g 1 | 5 | 2 | — | — | 15 | 188 | 6 | 9 | 44 | 1044 | 15 | 24 |
| Bla g 2 | — | — | 12 | 44 | 9 | 44 | 3 | 26 | 33 | 154 | 8 | 12 |
| Bla g 4 | 4 | 54 | 18 | 1389 | 20 | 85 | 21 | 58 | 33 | 286 | 8 | 11 |
| Bla g 5 | 1 | 2 | 41 | 945 | 29 | 1704 | 21 | 1179 | 56 | 1827 | 31 | 2872 |
| Bla g 9 | 3 | 314 | 12 | 192 | 47 | 1275 | 39 | 715 | 67 | 2281 | 54 | 1914 |
| Bla g 11 | 2 | 6 | 18 | 170 | 36 | 424 | 30 | 416 | 44 | 676 | 46 | 271 |
| NBGA1 | 7 | 290 | 29 | 932 | 47 | 621 | 39 | 700 | 56 | 406 | 62 | 579 |
| NBGA2 | 2 | 6 | 12 | 78 | 13 | 78 | 12 | 40 | 11 | 246 | 15 | 53 |
| NBGA3 | — | — | 6 | 21 | 24 | 123 | 15 | 71 | 33 | 85 | 39 | 273 |
| NBGA4 | 3 | 30 | 24 | 289 | 16 | 136 | 18 | 151 | 22 | 197 | 8 | 59 |
| NBGA5 | 2 | 11 | 12 | 33 | 7 | 19 | 6 | 17 | — | — | 15 | 37 |
| NBGA7 | 1 | 50 | 29 | 194 | 16 | 287 | 18 | 442 | 22 | 96 | 8 | 49 |
| NBGA11 | 1 | 15 | — | — | — | — | — | — | — | — | — | — |
| Enolase | 1 | 9 | 6 | 3 | 6 | 42 | 3 | 27 | 11 | 151 | 8 | 3 |
| RACK1 | 2 | 30 | — | — | 9 | 19 | 12 | 31 | 11 | 3 | — | — |
| TPI | 2 | 17 | 6 | 13 | 11 | 31 | 6 | 6 | 11 | 83 | 23 | 54 |

“%” denotes percentage of subjects responding to given antigen.
“SFC” denotes the mean magnitude of response.
“—” denotes no response.
“Asthmatic” combines the responses across IA, MMA, SA.

TABLE 2
Bla g-Sensitivity and Asthma Classification by Epitope Sets. Epitope sets
encompass epitopes denoted in Table 6. Percentages are calculated
from the total response per subject to the epitope sets.

| Epitope Set | No. Epitopes | AR | Asthmatic |
|---|---|---|---|
| Control | 16 | <1 | 1 |
| Rhinitis | 55 | 84 | 20 |
| Asthma | 147 | 5 | 55 |

“—” denotes no response.

TABLE 3
Subject Cohort Information. Individuals classified as Bla g sensitized
(wheal >3 mm and IgE titers >0.35 kUA/L) or control. Subjects further
subdivided by asthmatic status based on history, questionnaires, and
medication scores.

| | | | Age | Bla g | |
|---|---|---|---|---|---|
| | | | Range | Wheal | Bla g IgE |
| Group/Asthma Severity | Female | Male | (years) | (mm) | (kUA/L) |
| Control No Asthma | 7 | 6 | 21-56 | 0.2 | BLD |
| Control Intermittent | 2 | 3 | 22-33 | 0.2 | BLD |
| Control Moderate | 2 | 0 | 44-48 | 0.0 | BLD |
| Control Total | 11 | 9 | 21-56 | 0.2 | BLD |
| Bla g sensitized No | 12 | 4 | 20-45 | 5.4 | 9.5 |
| Asthma | | | | | |
| Bla g sensitized | 28 | 3 | 19-53 | 6.0 | 6.9 |
| Intermittent | | | | | |
| Bla g sensitized Mild | 3 | 1 | 35-51 | 5.5 | 17.9 |
| Bla g sensitized | 4 | 1 | 20-49 | 6.5 | 16.9 |
| Moderate | | | | | |
| Bla g sensitized Severe | 10 | 2 | 19-53 | 6.4 | 14.3 |
| Bla g Sensitized Total | 60 | 12 | 19-53 | 6.1 | 10.1 |

BLD = below limit of detection.

TABLE 4
Novel Bla g Proteins Discovered in Proteomic Screen. Full sequence
mRNA accession IDs listed. Length of protein given in amino
acid residues.

| Novel Bla g Antigen | Accession ID | Length |
|---|---|---|
| NBGA1 | AJ005115 | 1583 |
| NBGA2 | LN794619 | 731 |
| NBGA3 | LN794625 | 264 |
| NBGA4 | LN794631 | 1585 |
| NBGA5 | GBID01003088 | 718 |
| NBGA6 | LN794620 | 468 |
| NBGA7 | LN794623 | 343 |
| NBGA8 | LN794629 | 207 |
| NBGA9 | LN794621 | 203 |
| NBGA10 | LN794632 | 197 |
| NBGA11 | LN794630 | 193 |
| NBGA12 | LN794626 | 187 |
| NBGA13 | LN794624 | 143 |
| NBGA14 | LN794628 | 140 |
| NBGA15 | LN794627 | 133 |
| NBGA16 | LN794622 | 130 |

TABLE 5
Bla g Peptides Included in Epitope
Screen. (SEQ ID NOs.: 257-1833)

| Sequence | Antigen | Position | Set |
|---|---|---|---|
| NAIEFLNNIHDLLGI | Bla g 1 | 1 | Known Allergens |
| LNNIHDLLGIPHIPV | Bla g 1 | 6 | Known Allergens |
| DLLGIPHIPVTARKH | Bla g 1 | 11 | Known Allergens |
| PHIPVTARKHHRRGV | Bla g 1 | 16 | Known Allergens |
| TARKHHRRGVGITGL | Bla g 1 | 21 | Known Allergens |
| HRRGVGITGLIDDII | Bla g 1 | 26 | Known Allergens |
| GITGLIDDIIAILPV | Bla g 1 | 31 | Known Allergens |
| IDDIIAILPVDDLYA | Bla g 1 | 36 | Known Allergens |
| AILPVDDLYALFQEK | Bla g 1 | 41 | Known Allergens |
| DDLYALFQEKLETSP | Bla g 1 | 46 | Known Allergens |
| LFQEKLETSPEFKAL | Bla g 1 | 51 | Known Allergens |
| LETSPEFKALYDAIR | Bla g 1 | 56 | Known Allergens |
| EFKALYDAIRSPEFQ | Bla g 1 | 61 | Known Allergens |
| YDAIRSPEFQSIVGT | Bla g 1 | 66 | Known Allergens |
| SPEFQSIVGTLEAMP | Bla g 1 | 71 | Known Allergens |
| SIVGTLEAMPEYQNL | Bla g 1 | 76 | Known Allergens |
| LEAMPEYQNLIQKLK | Bla g 1 | 81 | Known Allergens |
| EYQNLIQKLKDKGVD | Bla g 1 | 86 | Known Allergens |
| IQKLKDKGVDVDHII | Bla g 1 | 91 | Known Allergens |
| DKGVDVDHIIELIHQ | Bla g 1 | 96 | Known Allergens |
| VDHIIELIHQIFNIV | Bla g 1 | 101 | Known Allergens |
| ELIHQIFNIVRDTRG | Bla g 1 | 106 | Known Allergens |
| IFNIVRDTRGLPEDL | Bla g 1 | 111 | Known Allergens |
| RDTRGLPEDLQDFLA | Bla g 1 | 116 | Known Allergens |
| DTRGLPEDLQDFLAL | Bla g 1 | 117 | Known Allergens |
| LPEDLQDFLALIPTD | Bla g 1 | 121 | Known Allergens |
| QDFLALIPTDQVLAI | Bla g 1 | 126 | Known Allergens |
| LIPTDQVLAIAADYL | Bla g 1 | 131 | Known Allergens |
| QVLAIAADYLANDAE | Bla g 1 | 136 | Known Allergens |
| AADYLANDAEVKAAV | Bla g 1 | 141 | Known Allergens |
| ANDAEVKAAVEYLKS | Bla g 1 | 146 | Known Allergens |
| VKAAVEYLKSDEFET | Bla g 1 | 151 | Known Allergens |
| EYLKSDEFETIVVTV | Bla g 1 | 156 | Known Allergens |
| DEFETIVVTVDSLPE | Bla g 1 | 161 | Known Allergens |
| IVVTVDSLPEFKNFL | Bla g 1 | 166 | Known Allergens |
| DSLPEFKNFLNFLQT | Bla g 1 | 171 | Known Allergens |
| FKNFLNFLQTNGLNA | Bla g 1 | 176 | Known Allergens |
| NFLQTNGLNAIEFLN | Bla g 1 | 181 | Known Allergens |
| NGLNAIEFLNNIHDL | Bla g 1 | 186 | Known Allergens |
| IEFLNNIHDLLGIPH | Bla g 1 | 191 | Known Allergens |
| NIHDLLGIPHIPVTG | Bla g 1 | 196 | Known Allergens |
| LGIPHIPVTGRKHLR | Bla g 1 | 201 | Known Allergens |
| IPVTGRKHLRRGVGI | Bla g 1 | 206 | Known Allergens |
| RKHLRRGVGITGLID | Bla g 1 | 211 | Known Allergens |
| HLRRGVGITGLIDDI | Bla g 1 | 213 | Known Allergens |
| RGVGITGLIDDIIAI | Bla g 1 | 216 | Known Allergens |
| TGLIDDIIAILPVDD | Bla g 1 | 221 | Known Allergens |
| DIIAILPVDDLYALF | Bla g 1 | 226 | Known Allergens |
| LPVDDLYALFQEKLE | Bla g 1 | 231 | Known Allergens |
| LYALFQEKLETSPEF | Bla g 1 | 236 | Known Allergens |
| QEKLETSPEFKALYD | Bla g 1 | 241 | Known Allergens |
| TSPEFKALYDAIRSP | Bla g 1 | 246 | Known Allergens |
| KALYDAIRSPEFQSI | Bla g 1 | 251 | Known Allergens |
| AIRSPEFQSIVETLK | Bla g 1 | 256 | Known Allergens |
| EFQSIVETLKAMPEY | Bla g 1 | 261 | Known Allergens |
| VETLKAMPEYQSLIQ | Bla g 1 | 266 | Known Allergens |
| AMPEYQSLIQKLKDK | Bla g 1 | 271 | Known Allergens |
| QSLIQKLKDKGVDVD | Bla g 1 | 276 | Known Allergens |
| KLKDKGVDVDHIIEL | Bla g 1 | 281 | Known Allergens |
| GVDVDHIIELIHQIF | Bla g 1 | 286 | Known Allergens |
| HIIELIHQIFNIVRD | Bla g 1 | 291 | Known Allergens |
| IHQIFNIVRDTRGLP | Bla g 1 | 296 | Known Allergens |
| NIVRDTRGLPEDLQD | Bla g 1 | 301 | Known Allergens |
| DTRGLPEDLQDFLAL | Bla g 1 | 305 | Known Allergens |
| TRGLPEDLQDFLALI | Bla g 1 | 306 | Known Allergens |
| EDLQDFLALIPIDQI | Bla g 1 | 311 | Known Allergens |
| FLALIPIDQILAIAA | Bla g 1 | 316 | Known Allergens |
| PIDQILAIAADYLAN | Bla g 1 | 321 | Known Allergens |
| LAIAADYLANDAEVQ | Bla g 1 | 326 | Known Allergens |
| DYLANDAEVQAAVEY | Bla g 1 | 331 | Known Allergens |
| DAEVQAAVEYLKSDE | Bla g 1 | 336 | Known Allergens |
| AAVEYLKSDEFETIV | Bla g 1 | 341 | Known Allergens |
| LKSDEFETIVVTVDS | Bla g 1 | 346 | Known Allergens |
| FETIVVTVDSLPEFK | Bla g 1 | 351 | Known Allergens |
| VTVDSLPEFKNFLNF | Bla g 1 | 356 | Known Allergens |
| LPEFKNFLNFLQTNG | Bla g 1 | 361 | Known Allergens |
| NFLNFLQTNGLNAIE | Bla g 1 | 366 | Known Allergens |
| LQTNGLNAIEFINNI | Bla g 1 | 371 | Known Allergens |
| LNAIEFINNIHDLLG | Bla g 1 | 376 | Known Allergens |
| FINNIHDLLGIPHIP | Bla g 1 | 381 | Known Allergens |
| HDLLGIPHIPATGRK | Bla g 1 | 386 | Known Allergens |
| IPHIPATGRKHVRRG | Bla g 1 | 391 | Known Allergens |
| ATGRKHVRRGVGING | Bla g 1 | 396 | Known Allergens |
| HVRRGVGINGLIDDV | Bla g 1 | 401 | Known Allergens |
| VGINGLIDDVIAILP | Bla g 1 | 406 | Known Allergens |
| LIDDVIAILPVDELY | Bla g 1 | 411 | Known Allergens |
| IAILPVDELYALFQE | Bla g 1 | 416 | Known Allergens |
| VDELYALFQEKLESS | Bla g 1 | 421 | Known Allergens |
| ALFQEKLESSPEFKA | Bla g 1 | 426 | Known Allergens |
| KLESSPEFKALYDAI | Bla g 1 | 431 | Known Allergens |
| PEFKALYDAIRSPEF | Bla g 1 | 436 | Known Allergens |
| LYDAIRSPEFQSIVQ | Bla g 1 | 441 | Known Allergens |
| RSPEFQSIVQTLKAM | Bla g 1 | 446 | Known Allergens |
| QSIVQTLKAMPEYQD | Bla g 1 | 451 | Known Allergens |
| TLKAMPEYQDLIQRL | Bla g 1 | 456 | Known Allergens |
| PEYQDLIQRLKDKGV | Bla g 1 | 461 | Known Allergens |
| LIQRLKDKGVDVDHF | Bla g 1 | 466 | Known Allergens |
| KDKGVDVDHFIELIK | Bla g 1 | 471 | Known Allergens |
| DVDHFIELIKKLFGL | Bla g 1 | 476 | Known Allergens |
| DHFIELIKKLFGLSH | Bla g 1 | 478 | Known Allergens |
| NLLEKLREKGVDVDK | Bla g 1.0101 | 1 | Known Allergens |
| LEKLREKGVDVDKII | Bla g 1.0101 | 3 | Known Allergens |
| EKGVDVDKIIELIRA | Bla g 1.0101 | 8 | Known Allergens |
| VDKIIELIRALFGLT | Bla g 1.0101 | 13 | Known Allergens |
| KIIELIRALFGLTLN | Bla g 1.0101 | 15 | Known Allergens |
| IRALFGLTLNAKASR | Bla g 1.0101 | 20 | Known Allergens |
| GLTLNAKASRNLQDD | Bla g 1.0101 | 25 | Known Allergens |
| AKASRNLQDDLQDFL | Bla g 1.0101 | 30 | Known Allergens |
| KASRNLQDDLQDFLA | Bla g 1.0101 | 31 | Known Allergens |
| ASRNLQDDLQDFLAL | Bla g 1.0101 | 32 | Known Allergens |
| LQDDLQDFLALIPVD | Bla g 1.0101 | 36 | Known Allergens |
| QDFLALIPVDQIIAI | Bla g 1.0101 | 41 | Known Allergens |
| LIPVDQIIAIATDYL | Bla g 1.0101 | 46 | Known Allergens |
| QIIAIATDYLANDAE | Bla g 1.0101 | 51 | Known Allergens |
| ATDYLANDAEVQAAV | Bla g 1.0101 | 56 | Known Allergens |
| ANDAEVQAAVAYLQS | Bla g 1.0101 | 61 | Known Allergens |
| VQAAVAYLQSDEFET | Bla g 1.0101 | 66 | Known Allergens |
| AYLQSDEFETIVVAL | Bla g 1.0101 | 71 | Known Allergens |
| DEFETIVVALDALPE | Bla g 1.0101 | 76 | Known Allergens |
| IVVALDALPELQNFL | Bla g 1.0101 | 81 | Known Allergens |
| DALPELQNFLNFLEA | Bla g 1.0101 | 86 | Known Allergens |
| LQNFLNFLEANGLNA | Bla g 1.0101 | 91 | Known Allergens |
| NFLEANGLNAIDFLN | Bla g 1.0101 | 96 | Known Allergens |
| NGLNAIDFLNGIHDL | Bla g 1.0101 | 101 | Known Allergens |
| IDFLNGIHDLLGIPH | Bla g 1.0101 | 106 | Known Allergens |
| GIHDLLGIPHIPVSG | Bla g 1.0101 | 111 | Known Allergens |
| DLLGIPHIPVSGRKY | Bla g 1.0101 | 114 | Known Allergens |
| PHIPVSGRKYHIRRG | Bla g 1.0101 | 119 | Known Allergens |
| SGRKYHIRRGVGITG | Bla g 1.0101 | 124 | Known Allergens |
| YHIRRGVGITGLIDD | Bla g 1.0101 | 128 | Known Allergens |
| HIRRGVGITGLIDDV | Bla g 1.0101 | 129 | Known Allergens |
| RGVGITGLIDDVLAI | Bla g 1.0101 | 132 | Known Allergens |
| TGLIDDVLAILPIED | Bla g 1.0101 | 137 | Known Allergens |
| DVLAILPIEDLKALF | Bla g 1.0101 | 142 | Known Allergens |
| LPIEDLKALFNEKLE | Bla g 1.0101 | 147 | Known Allergens |
| LKALFNEKLETSPDF | Bla g 1.0101 | 152 | Known Allergens |
| NEKLETSPDFLALYN | Bla g 1.0101 | 157 | Known Allergens |
| TSPDFLALYNAIRSP | Bla g 1.0101 | 162 | Known Allergens |
| LALYNAIRSPEFQSI | Bla g 1.0101 | 167 | Known Allergens |
| AIRSPEFQSIVQTLN | Bla g 1.0101 | 172 | Known Allergens |
| EFQSIVQTLNAMPEY | Bla g 1.0101 | 177 | Known Allergens |
| VQTLNAMPEYQNLLQ | Bla g 1.0101 | 182 | Known Allergens |
| AMPEYQNLLQKLREK | Bla g 1.0101 | 187 | Known Allergens |
| QNLLQKLREKGVDVD | Bla g 1.0101 | 192 | Known Allergens |
| KLREKGVDVDKIIEL | Bla g 1.0101 | 197 | Known Allergens |
| GVDVDKIIELIRALF | Bla g 1.0101 | 202 | Known Allergens |
| KIIELIRALFGLTLN | Bla g 1.0101 | 207 | Known Allergens |
| IRALFGLTLNGKASR | Bla g 1.0101 | 212 | Known Allergens |
| GLTLNGKASRNLQDD | Bla g 1.0101 | 217 | Known Allergens |
| LNGKASRNLQDDLQD | Bla g 1.0101 | 220 | Known Allergens |
| GKASRNLQDDLQDFL | Bla g 1.0101 | 222 | Known Allergens |
| KASRNLQDDLQDFLA | Bla g 1.0101 | 223 | Known Allergens |
| ASRNLQDDLQDFLAL | Bla g 1.0101 | 224 | Known Allergens |
| SRNLQDDLQDFLALI | Bla g 1.0101 | 225 | Known Allergens |
| DDLQDFLALIPVDQI | Bla g 1.0101 | 230 | Known Allergens |
| FLALIPVDQIIAIAT | Bla g 1.0101 | 235 | Known Allergens |
| PVDQIIAIATDYLAN | Bla g 1.0101 | 240 | Known Allergens |
| IAIATDYLANDAEVQ | Bla g 1.0101 | 245 | Known Allergens |
| DYLANDAEVQAAVAY | Bla g 1.0101 | 250 | Known Allergens |
| DAEVQAAVAYLQSDE | Bla g 1.0101 | 255 | Known Allergens |
| AAVAYLQSDEFETIV | Bla g 1.0101 | 260 | Known Allergens |
| LQSDEFETIVVTLDA | Bla g 1.0101 | 265 | Known Allergens |
| FETIVVTLDALPELQ | Bla g 1.0101 | 270 | Known Allergens |
| VTLDALPELQNFLNF | Bla g 1.0101 | 275 | Known Allergens |
| LPELQNFLNFLEANG | Bla g 1.0101 | 280 | Known Allergens |
| NFLNFLEANGLNAID | Bla g 1.0101 | 285 | Known Allergens |
| LEANGLNAIDFLNGI | Bla g 1.0101 | 290 | Known Allergens |
| LNAIDFLNGIHDLLG | Bla g 1.0101 | 295 | Known Allergens |
| FLNGIHDLLGIPHIP | Bla g 1.0101 | 300 | Known Allergens |
| HDLLGIPHIPVSGRK | Bla g 1.0101 | 305 | Known Allergens |
| IPHIPVSGRKYHIRR | Bla g 1.0101 | 310 | Known Allergens |
| VSGRKYHIRRGVGIT | Bla g 1.0101 | 315 | Known Allergens |
| HIRRGVGITGLIDDV | Bla g 1.0101 | 321 | Known Allergens |
| VGITGLIDDVLAILP | Bla g 1.0101 | 326 | Known Allergens |
| LIDDVLAILPLDDLK | Bla g 1.0101 | 331 | Known Allergens |
| LAILPLDDLKALFNE | Bla g 1.0101 | 336 | Known Allergens |
| LDDLKALFNEKLETS | Bla g 1.0101 | 341 | Known Allergens |
| ALFNEKLETSPDFLA | Bla g 1.0101 | 346 | Known Allergens |
| KLETSPDFLALYNAI | Bla g 1.0101 | 351 | Known Allergens |
| PDFLALYNAIKSPEF | Bla g 1.0101 | 356 | Known Allergens |
| LYNAIKSPEFQSIVQ | Bla g 1.0101 | 361 | Known Allergens |
| KSPEFQSIVQTLNAM | Bla g 1.0101 | 366 | Known Allergens |
| QSIVQTLNAMPEYQN | Bla g 1.0101 | 371 | Known Allergens |
| TLNAMPEYQNLLEKL | Bla g 1.0101 | 376 | Known Allergens |
| PEYQNLLEKLREKGV | Bla g 1.0101 | 381 | Known Allergens |
| LLEKLREKGVDVDKI | Bla g 1.0101 | 386 | Known Allergens |
| REKGVDVDKIIELIR | Bla g 1.0101 | 391 | Known Allergens |
| DVDKIIELIRALFGL | Bla g 1.0101 | 396 | Known Allergens |
| DKIIELIRALFGLTH | Bla g 1.0101 | 398 | Known Allergens |
| SQKDPHVWDGRSAIV | Bla g 11 | 18 | Known Allergens |
| HLFEWKFADIADECE | Bla g 11 | 33 | Known Allergens |
| KFADIADECERFLGP | Bla g 11 | 38 | Known Allergens |
| ADECERFLGPKGFAG | Bla g 11 | 43 | Known Allergens |
| RFLGPKGFAGVQVSP | Bla g 11 | 48 | Known Allergens |
| VQVSPVHENVIISSP | Bla g 11 | 58 | Known Allergens |
| IISSPFRPWWERYQL | Bla g 11 | 68 | Known Allergens |
| VSYKLVSRSGDENAF | Bla g 11 | 83 | Known Allergens |
| VSRSGDENAFRDMVR | Bla g 11 | 88 | Known Allergens |
| DENAFRDMVRRCNNV | Bla g 11 | 93 | Known Allergens |
| NQMSGSWPDAHGQGG | Bla g 11 | 118 | Known Allergens |
| SWPDAHGQGGSTADT | Bla g 11 | 123 | Known Allergens |
| HGQGGSTADTYNLQY | Bla g 11 | 128 | Known Allergens |
| STADTYNLQYPAVPY | Bla g 11 | 133 | Known Allergens |
| YNLQYPAVPYGPGDF | Bla g 11 | 138 | Known Allergens |
| PAVPYGPGDFHSTCT | Bla g 11 | 143 | Known Allergens |
| GPGDFHSTCTVSNYQ | Bla g 11 | 148 | Known Allergens |
| HSTCTVSNYQDPSNV | Bla g 11 | 153 | Known Allergens |
| VSNYQDPSNVRNCEL | Bla g 11 | 158 | Known Allergens |
| DPSNVRNCELVGLHD | Bla g 11 | 163 | Known Allergens |
| RNCELVGLHDLNQGS | Bla g 11 | 168 | Known Allergens |
| VGLHDLNQGSDYVRG | Bla g 11 | 173 | Known Allergens |
| LNHLVDCGVAGFRVD | Bla g 11 | 193 | Known Allergens |
| AAKHMWPADLQYIYS | Bla g 11 | 208 | Known Allergens |
| WPADLQYIYSKVNNL | Bla g 11 | 213 | Known Allergens |
| QYIYSKVNNLNTDHG | Bla g 11 | 218 | Known Allergens |
| KVNNLNTDHGFPSGA | Bla g 11 | 223 | Known Allergens |
| NTDHGFPSGARPFFY | Bla g 11 | 228 | Known Allergens |
| FPSGARPFFYQEVID | Bla g 11 | 233 | Known Allergens |
| RPFFYQEVIDLGGEA | Bla g 11 | 238 | Known Allergens |
| QEVIDLGGEAIHSTE | Bla g 11 | 243 | Known Allergens |
| LGGEAIHSTEYTGFG | Bla g 11 | 248 | Known Allergens |
| IHSTEYTGFGRVTEF | Bla g 11 | 253 | Known Allergens |
| YTGFGRVTEFKYSRD | Bla g 11 | 258 | Known Allergens |
| RVTEFKYSRDIGDAF | Bla g 11 | 263 | Known Allergens |
| KYSRDIGDAFRGNNA | Bla g 11 | 268 | Known Allergens |
| IGDAFRGNNAIKWLV | Bla g 11 | 273 | Known Allergens |
| RGNNAIKWLVNFGVG | Bla g 11 | 278 | Known Allergens |
| IKWLVNFGVGWGYIP | Bla g 11 | 283 | Known Allergens |
| NFGVGWGYIPDGDAL | Bla g 11 | 288 | Known Allergens |
| WGYIPDGDALVFVDN | Bla g 11 | 293 | Known Allergens |
| DGDALVFVDNHDNQR | Bla g 11 | 298 | Known Allergens |
| VFVDNHDNQRGHGAG | Bla g 11 | 303 | Known Allergens |
| HDNQRGHGAGGASIL | Bla g 11 | 308 | Known Allergens |
| GHGAGGASILTYKTS | Bla g 11 | 313 | Known Allergens |
| GASILTYKTSKLYKM | Bla g 11 | 318 | Known Allergens |
| TYKTSKLYKMAVAFM | Bla g 11 | 323 | Known Allergens |
| KLYKMAVAFMLAYPY | Bla g 11 | 328 | Known Allergens |
| AVAFMLAYPYGYPRV | Bla g 11 | 333 | Known Allergens |
| LAYPYGYPRVMSSFS | Bla g 11 | 338 | Known Allergens |
| GYPRVMSSFSFDNSD | Bla g 11 | 343 | Known Allergens |
| MSSFSFDNSDQGPPQ | Bla g 11 | 348 | Known Allergens |
| FDNSDQGPPQDGNGN | Bla g 11 | 353 | Known Allergens |
| QGPPQDGNGNIISPS | Bla g 11 | 358 | Known Allergens |
| DGNGNIISPSINADG | Bla g 11 | 363 | Known Allergens |
| IISPSINADGTCGNG | Bla g 11 | 368 | Known Allergens |
| INADGTCGNGWVCEH | Bla g 11 | 373 | Known Allergens |
| TCGNGWVCEHRWRQI | Bla g 11 | 378 | Known Allergens |
| WVCEHRWRQIFNMVG | Bla g 11 | 383 | Known Allergens |
| RWRQIFNMVGFRNAV | Bla g 11 | 388 | Known Allergens |
| FNMVGFRNAVAGTAV | Bla g 11 | 393 | Known Allergens |
| FRNAVAGTAVSNWWD | Bla g 11 | 398 | Known Allergens |
| AGTAVSNWWDNGDKQ | Bla g 11 | 403 | Known Allergens |
| SNWWDNGDKQISFCR | Bla g 11 | 408 | Known Allergens |
| NGDKQISFCRGNKGF | Bla g 11 | 413 | Known Allergens |
| ISFCRGNKGFVAFND | Bla g 11 | 418 | Known Allergens |
| GNKGFVAFNDEFNND | Bla g 11 | 423 | Known Allergens |
| VAFNDEFNNDLKQTL | Bla g 11 | 428 | Known Allergens |
| EFNNDLKQTLQTCLP | Bla g 11 | 433 | Known Allergens |
| LKQTLQTCLPAGDYC | Bla g 11 | 438 | Known Allergens |
| QTCLPAGDYCDVISG | Bla g 11 | 443 | Known Allergens |
| AGDYCDVISGSYENG | Bla g 11 | 448 | Known Allergens |
| DVISGSYENGSCTGK | Bla g 11 | 453 | Known Allergens |
| SYENGSCTGKTVTVG | Bla g 11 | 458 | Known Allergens |
| SCTGKTVTVGSDGKA | Bla g 11 | 463 | Known Allergens |
| TVTVGSDGKAYIEIL | Bla g 11 | 468 | Known Allergens |
| SDGKAYIEILSSADD | Bla g 11 | 473 | Known Allergens |
| YIEILSSADDGVLAI | Bla g 11 | 478 | Known Allergens |
| SSADDGVLAIHVNSK | Bla g 11 | 483 | Known Allergens |
| GVLAIHVNSKVGSKS | Bla g 11 | 488 | Known Allergens |
| HVNSKVGSKSQTTTT | Bla g 11 | 493 | Known Allergens |
| VGSKSQTTTTQSSHC | Bla g 11 | 498 | Known Allergens |
| KSQTTTTQSSHCTCS | Bla g 11 | 503 | Known Allergens |
| MIGLKLVTVLFAVAT | Bla g 2 | 1 | Known Allergens |
| LVTVLFAVATITHAA | Bla g 2 | 6 | Known Allergens |
| FAVATITHAAELQRV | Bla g 2 | 11 | Known Allergens |
| ITHAAELQRVPLYKL | Bla g 2 | 16 | Known Allergens |
| ELQRVPLYKLVHVFI | Bla g 2 | 21 | Known Allergens |
| PLYKLVHVFINTQYA | Bla g 2 | 26 | Known Allergens |
| VHVFINTQYAGITKI | Bla g 2 | 31 | Known Allergens |
| NTQYAGITKIGNQNF | Bla g 2 | 36 | Known Allergens |
| GITKIGNQNFLTVFD | Bla g 2 | 41 | Known Allergens |
| GNQNFLTVFDSTSCN | Bla g 2 | 46 | Known Allergens |
| LTVFDSTSCNVVVAS | Bla g 2 | 51 | Known Allergens |
| STSCNVVVASQECVG | Bla g 2 | 56 | Known Allergens |
| VVVASQECVGGACVC | Bla g 2 | 61 | Known Allergens |
| QECVGGACVCPNLQK | Bla g 2 | 66 | Known Allergens |
| GACVCPNLQKYEKLK | Bla g 2 | 71 | Known Allergens |
| PNLQKYEKLKPKYIS | Bla g 2 | 76 | Known Allergens |
| YEKLKPKYISDGNVQ | Bla g 2 | 81 | Known Allergens |
| PKYISDGNVQVKFFD | Bla g 2 | 86 | Known Allergens |
| DGNVQVKFFDTGSAV | Bla g 2 | 91 | Known Allergens |
| VKFFDTGSAVGRGIE | Bla g 2 | 96 | Known Allergens |
| TGSAVGRGIEDSLTI | Bla g 2 | 101 | Known Allergens |
| GRGIEDSLTISNLTT | Bla g 2 | 106 | Known Allergens |
| DSLTISNLTTSQQDI | Bla g 2 | 111 | Known Allergens |
| SNLTTSQQDIVLADE | Bla g 2 | 116 | Known Allergens |
| SQQDIVLADELSQEV | Bla g 2 | 121 | Known Allergens |
| VLADELSQEVCILSA | Bla g 2 | 126 | Known Allergens |
| LSQEVCILSADVVVG | Bla g 2 | 131 | Known Allergens |
| CILSADVVVGIAAPG | Bla g 2 | 136 | Known Allergens |
| DVVVGIAAPGCPNAL | Bla g 2 | 141 | Known Allergens |
| IAAPGCPNALKGKTV | Bla g 2 | 146 | Known Allergens |
| CPNALKGKTVLENFV | Bla g 2 | 151 | Known Allergens |
| KGKTVLENFVEENLI | Bla g 2 | 156 | Known Allergens |
| LENFVEENLIAPVFS | Bla g 2 | 161 | Known Allergens |
| EENLIAPVFSIHHAR | Bla g 2 | 166 | Known Allergens |
| APVFSIHHARFQDGE | Bla g 2 | 171 | Known Allergens |
| IHHARFQDGEHFGEI | Bla g 2 | 176 | Known Allergens |
| FQDGEHFGEIIFGGS | Bla g 2 | 181 | Known Allergens |
| HFGEIIFGGSDWKYV | Bla g 2 | 186 | Known Allergens |
| IFGGSDWKYVDGEFT | Bla g 2 | 191 | Known Allergens |
| DWKYVDGEFTYVPLV | Bla g 2 | 196 | Known Allergens |
| DGEFTYVPLVGDDSW | Bla g 2 | 201 | Known Allergens |
| YVPLVGDDSWKFRLD | Bla g 2 | 206 | Known Allergens |
| GDDSWKFRLDGVKIG | Bla g 2 | 211 | Known Allergens |
| KFRLDGVKIGDTTVA | Bla g 2 | 216 | Known Allergens |
| GVKIGDTTVAPAGTQ | Bla g 2 | 221 | Known Allergens |
| DTTVAPAGTQAIIDT | Bla g 2 | 226 | Known Allergens |
| PAGTQAIIDTSKAII | Bla g 2 | 231 | Known Allergens |
| AIIDTSKAIIVGPKA | Bla g 2 | 236 | Known Allergens |
| SKAIIVGPKAYVNPI | Bla g 2 | 241 | Known Allergens |
| VGPKAYVNPINEAIG | Bla g 2 | 246 | Known Allergens |
| YVNPINEAIGCVVEK | Bla g 2 | 251 | Known Allergens |
| NEAIGCVVEKTTTRR | Bla g 2 | 256 | Known Allergens |
| CVVEKTTTRRICKLD | Bla g 2 | 261 | Known Allergens |
| TTTRRICKLDCSKIP | Bla g 2 | 266 | Known Allergens |
| ICKLDCSKIPSLPDV | Bla g 2 | 271 | Known Allergens |
| CSKIPSLPDVTFVIN | Bla g 2 | 276 | Known Allergens |
| SLPDVTFVINGRNFN | Bla g 2 | 281 | Known Allergens |
| TFVINGRNFNISSQY | Bla g 2 | 286 | Known Allergens |
| GRNFNISSQYYIQQN | Bla g 2 | 291 | Known Allergens |
| ISSQYYIQQNGNLCY | Bla g 2 | 296 | Known Allergens |
| YIQQNGNLCYSGFQP | Bla g 2 | 301 | Known Allergens |
| GNLCYSGFQPCGHSD | Bla g 2 | 306 | Known Allergens |
| SGFQPCGHSDHFFIG | Bla g 2 | 311 | Known Allergens |
| CGHSDHFFIGDFFVD | Bla g 2 | 316 | Known Allergens |
| HFFIGDFFVDHYYSE | Bla g 2 | 321 | Known Allergens |
| DFFVDHYYSEFNWEN | Bla g 2 | 326 | Known Allergens |
| HYYSEFNWENKTMGF | Bla g 2 | 331 | Known Allergens |
| FNWENKTMGFGRSVE | Bla g 2 | 336 | Known Allergens |
| WENKTMGFGRSVESV | Bla g 2 | 338 | Known Allergens |
| AVLALCATDTLANED | Bla g 4 | 1 | Known Allergens |
| CATDTLANEDCFRHE | Bla g 4 | 6 | Known Allergens |
| LANEDCFRHESLVPN | Bla g 4 | 11 | Known Allergens |
| CFRHESLVPNLDYER | Bla g 4 | 16 | Known Allergens |
| SLVPNLDYERFRGSW | Bla g 4 | 21 | Known Allergens |
| LDYERFRGSWIIAAG | Bla g 4 | 26 | Known Allergens |
| FRGSWIIAAGTSEAL | Bla g 4 | 31 | Known Allergens |
| IIAAGTSEALTQYKC | Bla g 4 | 36 | Known Allergens |
| TSEALTQYKCWIDRF | Bla g 4 | 41 | Known Allergens |
| TQYKCWIDRFSYDDA | Bla g 4 | 46 | Known Allergens |
| WIDRFSYDDALVSKY | Bla g 4 | 51 | Known Allergens |
| SYDDALVSKYTDSQG | Bla g 4 | 56 | Known Allergens |
| LVSKYTDSQGKNRTT | Bla g 4 | 61 | Known Allergens |
| TDSQGKNRTTIRGRT | Bla g 4 | 66 | Known Allergens |
| KNRTTIRGRTKFEGN | Bla g 4 | 71 | Known Allergens |
| IRGRTKFEGNKFTID | Bla g 4 | 76 | Known Allergens |
| KFEGNKFTIDYNDKG | Bla g 4 | 81 | Known Allergens |
| KFTIDYNDKGKAFSA | Bla g 4 | 86 | Known Allergens |
| YNDKGKAFSAPYSVL | Bla g 4 | 91 | Known Allergens |
| KAFSAPYSVLATDYE | Bla g 4 | 96 | Known Allergens |
| PYSVLATDYENYAIV | Bla g 4 | 101 | Known Allergens |
| ATDYENYAIVEGCPA | Bla g 4 | 106 | Known Allergens |
| NYAIVEGCPAAANGH | Bla g 4 | 111 | Known Allergens |
| EGCPAAANGHVIYVQ | Bla g 4 | 116 | Known Allergens |
| AANGHVIYVQIRFSV | Bla g 4 | 121 | Known Allergens |
| VIYVQIRFSVRRFHP | Bla g 4 | 126 | Known Allergens |
| IRFSVRRFHPKLGDK | Bla g 4 | 131 | Known Allergens |
| RRFHPKLGDKEMIQH | Bla g 4 | 136 | Known Allergens |
| KLGDKEMIQHYTLDQ | Bla g 4 | 141 | Known Allergens |
| EMIQHYTLDQVNQHK | Bla g 4 | 146 | Known Allergens |
| YTLDQVNQHKKAIEE | Bla g 4 | 151 | Known Allergens |
| VNQHKKAIEEDLKHF | Bla g 4 | 156 | Known Allergens |
| KAIEEDLKHFNLKYE | Bla g 4 | 161 | Known Allergens |
| DLKHFNLKYEDLHST | Bla g 4 | 166 | Known Allergens |
| KHFNLKYEDLHSTCH | Bla g 4 | 168 | Known Allergens |
| MAPSYKLTYCPVKAL | Bla g 5 | 1 | Known Allergens |
| KLTYCPVKALGEPIR | Bla g 5 | 6 | Known Allergens |
| PVKALGEPIRFLLSY | Bla g 5 | 11 | Known Allergens |
| GEPIRFLLSYGEKDF | Bla g 5 | 16 | Known Allergens |
| FLLSYGEKDFEDYRF | Bla g 5 | 21 | Known Allergens |
| GEKDFEDYRFQEGDW | Bla g 5 | 26 | Known Allergens |
| EDYRFQEGDWPNLKP | Bla g 5 | 31 | Known Allergens |
| QEGDWPNLKPSMPFG | Bla g 5 | 36 | Known Allergens |
| PNLKPSMPFGKTPVL | Bla g 5 | 41 | Known Allergens |
| SMPFGKTPVLEIDGK | Bla g 5 | 46 | Known Allergens |
| KTPVLEIDGKQTHQS | Bla g 5 | 51 | Known Allergens |
| EIDGKQTHQSVAISR | Bla g 5 | 56 | Known Allergens |
| QTHQSVAISRYLGKQ | Bla g 5 | 61 | Known Allergens |
| VAISRYLGKQFGLSG | Bla g 5 | 66 | Known Allergens |
| YLGKQFGLSGKDDWE | Bla g 5 | 71 | Known Allergens |
| FGLSGKDDWENLEID | Bla g 5 | 76 | Known Allergens |
| KDDWENLEIDMIVDT | Bla g 5 | 81 | Known Allergens |
| NLEIDMIVDTISDFR | Bla g 5 | 86 | Known Allergens |
| MIVDTISDFRAAIAN | Bla g 5 | 91 | Known Allergens |
| ISDFRAAIANYHYDA | Bla g 5 | 96 | Known Allergens |
| AAIANYHYDADENSK | Bla g 5 | 101 | Known Allergens |
| YHYDADENSKQKKWD | Bla g 5 | 106 | Known Allergens |
| DENSKQKKWDPLKKE | Bla g 5 | 111 | Known Allergens |
| QKKWDPLKKETIPYY | Bla g 5 | 116 | Known Allergens |
| PLKKETIPYYTKKFD | Bla g 5 | 121 | Known Allergens |
| TIPYYTKKFDEVVKA | Bla g 5 | 126 | Known Allergens |
| TKKFDEVVKANGGYL | Bla g 5 | 131 | Known Allergens |
| EVVKANGGYLAAGKL | Bla g 5 | 136 | Known Allergens |
| NGGYLAAGKLTWADF | Bla g 5 | 141 | Known Allergens |
| AAGKLTWADFYFVAI | Bla g 5 | 146 | Known Allergens |
| TWADFYFVAILDYLN | Bla g 5 | 151 | Known Allergens |
| YFVAILDYLNHMAKE | Bla g 5 | 156 | Known Allergens |
| LDYLNHMAKEDLVAN | Bla g 5 | 161 | Known Allergens |
| HMAKEDLVANQPNLK | Bla g 5 | 166 | Known Allergens |
| DLVANQPNLKALREK | Bla g 5 | 171 | Known Allergens |
| QPNLKALREKVLGLP | Bla g 5 | 176 | Known Allergens |
| ALREKVLGLPAIKAW | Bla g 5 | 181 | Known Allergens |
| VLGLPAIKAWVAKRP | Bla g 5 | 186 | Known Allergens |
| PAIKAWVAKRPPTDL | Bla g 5 | 190 | Known Allergens |
| MADEQLQLPPEQISV | Bla g 6 | 1 | Known Allergens |
| LQLPPEQISVLRKAF | Bla g 6 | 6 | Known Allergens |
| EQISVLRKAFDAFDR | Bla g 6 | 11 | Known Allergens |
| LRKAFDAFDREKSGS | Bla g 6 | 16 | Known Allergens |
| DAFDREKSGSISTNM | Bla g 6 | 21 | Known Allergens |
| EKSGSISTNMVEEIL | Bla g 6 | 26 | Known Allergens |
| ISTNMVEEILRLMGQ | Bla g 6 | 31 | Known Allergens |
| VEEILRLMGQPFNRR | Bla g 6 | 36 | Known Allergens |
| RLMGQPFNRRTLEEL | Bla g 6 | 41 | Known Allergens |
| PFNRRTLEELIDEVD | Bla g 6 | 46 | Known Allergens |
| TLEELIDEVDADKSG | Bla g 6 | 51 | Known Allergens |
| IDEVDADKSGRLEFD | Bla g 6 | 56 | Known Allergens |
| ADKSGRLEFDEFVTL | Bla g 6 | 61 | Known Allergens |
| RLEFDEFVTLAAKFI | Bla g 6 | 66 | Known Allergens |
| EFVTLAAKFIIEEDS | Bla g 6 | 71 | Known Allergens |
| AAKFIIEEDSEAMEK | Bla g 6 | 76 | Known Allergens |
| IEEDSEAMEKELREA | Bla g 6 | 81 | Known Allergens |
| EAMEKELREAFRLYD | Bla g 6 | 86 | Known Allergens |
| ELREAFRLYDKEGNG | Bla g 6 | 91 | Known Allergens |
| FRLYDKEGNGYIPTS | Bla g 6 | 96 | Known Allergens |
| KEGNGYIPTSCLREI | Bla g 6 | 101 | Known Allergens |
| YIPTSCLREILRELD | Bla g 6 | 106 | Known Allergens |
| CLREILRELDEQLTS | Bla g 6 | 111 | Known Allergens |
| LRELDEQLTSDELDM | Bla g 6 | 116 | Known Allergens |
| EQLTSDELDMMIEEI | Bla g 6 | 121 | Known Allergens |
| DELDMMIEEIDADGS | Bla g 6 | 126 | Known Allergens |
| MIEEIDADGSGTVDF | Bla g 6 | 131 | Known Allergens |
| DADGSGTVDFDEFME | Bla g 6 | 136 | Known Allergens |
| SGTVDFDEFMEMMTG | Bla g 6 | 140 | Known Allergens |
| MDEIPAEQVVLLKKA | Bla g 6.0101 | 1 | Known Allergens |
| DEIPAEQVVLLKKAF | Bla g 6.0101 | 2 | Known Allergens |
| EQVVLLKKAFDAFDR | Bla g 6.0101 | 7 | Known Allergens |
| LKKAFDAFDREKKGC | Bla g 6.0101 | 12 | Known Allergens |
| DAFDREKKGCISTEM | Bla g 6.0101 | 17 | Known Allergens |
| EKKGCISTEMVGTIL | Bla g 6.0101 | 22 | Known Allergens |
| ISTEMVGTILEMLGT | Bla g 6.0101 | 27 | Known Allergens |
| VGTILEMLGTRLDQD | Bla g 6.0101 | 32 | Known Allergens |
| EMLGTRLDQDMLDEI | Bla g 6.0101 | 37 | Known Allergens |
| RLDQDMLDEIIAEVD | Bla g 6.0101 | 42 | Known Allergens |
| MLDEIIAEVDADGSG | Bla g 6.0101 | 47 | Known Allergens |
| IAEVDADGSGELEFE | Bla g 6.0101 | 52 | Known Allergens |
| ADGSGELEFEEFCTL | Bla g 6.0101 | 57 | Known Allergens |
| ELEFEEFCTLASRFL | Bla g 6.0101 | 62 | Known Allergens |
| EFCTLASRFLVEEDA | Bla g 6.0101 | 67 | Known Allergens |
| ASRFLVEEDAEAMQH | Bla g 6.0101 | 72 | Known Allergens |
| VEEDAEAMQHELREA | Bla g 6.0101 | 77 | Known Allergens |
| EAMQHELREAFRLYD | Bla g 6.0101 | 82 | Known Allergens |
| ELREAFRLYDKEGNG | Bla g 6.0101 | 87 | Known Allergens |
| FRLYDKEGNGYITTA | Bla g 6.0101 | 92 | Known Allergens |
| KEGNGYITTAVLREI | Bla g 6.0101 | 97 | Known Allergens |
| YITTAVLREILKELD | Bla g 6.0101 | 102 | Known Allergens |
| VLREILKELDDKITA | Bla g 6.0101 | 107 | Known Allergens |
| LKELDDKITAEDLDM | Bla g 6.0101 | 112 | Known Allergens |
| DKITAEDLDMMIEEI | Bla g 6.0101 | 117 | Known Allergens |
| EDLDMMIEEIDSDGS | Bla g 6.0101 | 122 | Known Allergens |
| MIEEIDSDGSGTVDF | Bla g 6.0101 | 127 | Known Allergens |
| DSDGSGTVDFDEFME | Bla g 6.0101 | 132 | Known Allergens |
| SGTVDFDEFMEVMTG | Bla g 6.0101 | 136 | Known Allergens |
| GTVDFDEFMEVMTGE | Bla g 6.0101 | 137 | Known Allergens |
| MDELPPEQIQLLKKA | Bla g 6.0201 | 1 | Known Allergens |
| DELPPEQIQLLKKAF | Bla g 6.0201 | 2 | Known Allergens |
| EQIQLLKKAFDAFDR | Bla g 6.0201 | 7 | Known Allergens |
| ISTEMVGTILEMLGH | Bla g 6.0201 | 27 | Known Allergens |
| VGTILEMLGHRLDDD | Bla g 6.0201 | 32 | Known Allergens |
| EMLGHRLDDDMLQEI | Bla g 6.0201 | 37 | Known Allergens |
| RLDDDMLQEIIAEVD | Bla g 6.0201 | 42 | Known Allergens |
| MLQEIIAEVDADGSG | Bla g 6.0201 | 47 | Known Allergens |
| ADGSGELEFEEFVSL | Bla g 6.0201 | 57 | Known Allergens |
| ELEFEEFVSLASRFL | Bla g 6.0201 | 62 | Known Allergens |
| EFVSLASRFLVEEDA | Bla g 6.0201 | 67 | Known Allergens |
| ASRFLVEEDAEAMQQ | Bla g 6.0201 | 72 | Known Allergens |
| VEEDAEAMQQELREA | Bla g 6.0201 | 77 | Known Allergens |
| EAMQQELREAFRLYD | Bla g 6.0201 | 82 | Known Allergens |
| FRLYDKEGNGYITTN | Bla g 6.0201 | 92 | Known Allergens |
| KEGNGYITTNVLREI | Bla g 6.0201 | 97 | Known Allergens |
| YITTNVLREILKELD | Bla g 6.0201 | 102 | Known Allergens |
| MDAIKKKMQAMKLEK | Bla g 7 | 1 | Known Allergens |
| KKMQAMKLEKDNAMD | Bla g 7 | 6 | Known Allergens |
| MKLEKDNAMDRALLC | Bla g 7 | 11 | Known Allergens |
| DNAMDRALLCEQQAR | Bla g 7 | 16 | Known Allergens |
| RALLCEQQARDANIR | Bla g 7 | 21 | Known Allergens |
| EQQARDANIRAEKAE | Bla g 7 | 26 | Known Allergens |
| DANIRAEKAEEEARS | Bla g 7 | 31 | Known Allergens |
| AEKAEEEARSLQKKI | Bla g 7 | 36 | Known Allergens |
| EEARSLQKKIQQIEN | Bla g 7 | 41 | Known Allergens |
| LQKKIQQIENDLDQT | Bla g 7 | 46 | Known Allergens |
| QQIENDLDQTMEQLM | Bla g 7 | 51 | Known Allergens |
| DLDQTMEQLMQVNAK | Bla g 7 | 56 | Known Allergens |
| MEQLMQVNAKLDEKD | Bla g 7 | 61 | Known Allergens |
| QVNAKLDEKDKALQN | Bla g 7 | 66 | Known Allergens |
| LDEKDKALQNAESEV | Bla g 7 | 71 | Known Allergens |
| KALQNAESEVAALNR | Bla g 7 | 76 | Known Allergens |
| AESEVAALNRRIQLL | Bla g 7 | 81 | Known Allergens |
| AALNRRIQLLEEDLE | Bla g 7 | 86 | Known Allergens |
| RIQLLEEDLERSEER | Bla g 7 | 91 | Known Allergens |
| EEDLERSEERLATAT | Bla g 7 | 96 | Known Allergens |
| RSEERLATATAKLAE | Bla g 7 | 101 | Known Allergens |
| LATATAKLAEASQAA | Bla g 7 | 106 | Known Allergens |
| AKLAEASQAADESER | Bla g 7 | 111 | Known Allergens |
| ASQAADESERARKIL | Bla g 7 | 116 | Known Allergens |
| DESERARKILESKGL | Bla g 7 | 121 | Known Allergens |
| ARKILESKGLADEER | Bla g 7 | 126 | Known Allergens |
| ESKGLADEERMDALE | Bla g 7 | 131 | Known Allergens |
| ADEERMDALENQLKE | Bla g 7 | 136 | Known Allergens |
| MDALENQLKEARFMA | Bla g 7 | 141 | Known Allergens |
| NQLKEARFMAEEADK | Bla g 7 | 146 | Known Allergens |
| ARFMAEEADKKYDEV | Bla g 7 | 151 | Known Allergens |
| EEADKKYDEVARKLA | Bla g 7 | 156 | Known Allergens |
| KYDEVARKLAMVEAD | Bla g 7 | 161 | Known Allergens |
| ARKLAMVEADLERAE | Bla g 7 | 166 | Known Allergens |
| MVEADLERAEERAET | Bla g 7 | 171 | Known Allergens |
| LERAEERAETGESKI | Bla g 7 | 176 | Known Allergens |
| ERAETGESKIVELEE | Bla g 7 | 181 | Known Allergens |
| GESKIVELEEELRVV | Bla g 7 | 186 | Known Allergens |
| VELEEELRVVGNNLK | Bla g 7 | 191 | Known Allergens |
| ELRVVGNNLKSLEVS | Bla g 7 | 196 | Known Allergens |
| GNNLKSLEVSEEKAN | Bla g 7 | 201 | Known Allergens |
| SLEVSEEKANLREEE | Bla g 7 | 206 | Known Allergens |
| EEKANLREEEYKQQI | Bla g 7 | 211 | Known Allergens |
| LREEEYKQQIKTLNT | Bla g 7 | 216 | Known Allergens |
| YKQQIKTLNTRLKEA | Bla g 7 | 221 | Known Allergens |
| KTLNTRLKEAEARAE | Bla g 7 | 226 | Known Allergens |
| RLKEAEARAEFAERS | Bla g 7 | 231 | Known Allergens |
| EARAEFAERSVQKLQ | Bla g 7 | 236 | Known Allergens |
| FAERSVQKLQKEVDR | Bla g 7 | 241 | Known Allergens |
| VQKLQKEVDRLEDEL | Bla g 7 | 246 | Known Allergens |
| KEVDRLEDELVHEKE | Bla g 7 | 251 | Known Allergens |
| LEDELVHEKEKYKYI | Bla g 7 | 256 | Known Allergens |
| VHEKEKYKYICDDLD | Bla g 7 | 261 | Known Allergens |
| KYKYICDDLDMTFTE | Bla g 7 | 266 | Known Allergens |
| ICDDLDMTFTELIGN | Bla g 7 | 270 | Known Allergens |
| MVDAAVLEKLEAGFA | Bla g 9 | 1 | Known Allergens |
| VLEKLEAGFAKLAAS | Bla g 9 | 6 | Known Allergens |
| EAGFAKLAASDSKSL | Bla g 9 | 11 | Known Allergens |
| KLAASDSKSLLRKYL | Bla g 9 | 16 | Known Allergens |
| DSKSLLRKYLTKEVF | Bla g 9 | 21 | Known Allergens |
| LRKYLTKEVFDNLKT | Bla g 9 | 26 | Known Allergens |
| TKEVFDNLKTKKTPT | Bla g 9 | 31 | Known Allergens |
| DNLKTKKTPTFGSTL | Bla g 9 | 36 | Known Allergens |
| KKTPTFGSTLLDVIQ | Bla g 9 | 41 | Known Allergens |
| FGSTLLDVIQSGLEN | Bla g 9 | 46 | Known Allergens |
| LDVIQSGLENHDSGV | Bla g 9 | 51 | Known Allergens |
| SGLENHDSGVGIYAP | Bla g 9 | 56 | Known Allergens |
| HDSGVGIYAPDAEAY | Bla g 9 | 61 | Known Allergens |
| GIYAPDAEAYTVFAD | Bla g 9 | 66 | Known Allergens |
| DAEAYTVFADLFDPI | Bla g 9 | 71 | Known Allergens |
| TVFADLFDPIIEDYH | Bla g 9 | 76 | Known Allergens |
| LFDPIIEDYHGGFKK | Bla g 9 | 81 | Known Allergens |
| IEDYHGGFKKTDKHP | Bla g 9 | 86 | Known Allergens |
| GGFKKTDKHPPKDWG | Bla g 9 | 91 | Known Allergens |
| TDKHPPKDWGDVDTL | Bla g 9 | 96 | Known Allergens |
| PKDWGDVDTLGNLDP | Bla g 9 | 101 | Known Allergens |
| DVDTLGNLDPAGEYI | Bla g 9 | 106 | Known Allergens |
| GNLDPAGEYIISTRV | Bla g 9 | 111 | Known Allergens |
| AGEYIISTRVRCGRS | Bla g 9 | 116 | Known Allergens |
| ISTRVRCGRSMQGYP | Bla g 9 | 121 | Known Allergens |
| RCGRSMQGYPFNPCL | Bla g 9 | 126 | Known Allergens |
| MQGYPFNPCLTEAQY | Bla g 9 | 131 | Known Allergens |
| FNPCLTEAQYKEMED | Bla g 9 | 136 | Known Allergens |
| TEAQYKEMEDKVSST | Bla g 9 | 141 | Known Allergens |
| KEMEDKVSSTLSGLE | Bla g 9 | 146 | Known Allergens |
| KVSSTLSGLEGELKG | Bla g 9 | 151 | Known Allergens |
| LSGLEGELKGQFYPL | Bla g 9 | 156 | Known Allergens |
| GELKGQFYPLTGMTK | Bla g 9 | 161 | Known Allergens |
| QFYPLTGMTKEVQQK | Bla g 9 | 166 | Known Allergens |
| TGMTKEVQQKLIDDH | Bla g 9 | 171 | Known Allergens |
| EVQQKLIDDHFLFKE | Bla g 9 | 176 | Known Allergens |
| LIDDHFLFKEGDRFL | Bla g 9 | 181 | Known Allergens |
| FLFKEGDRFLQHANA | Bla g 9 | 186 | Known Allergens |
| GDRFLQHANACRFWP | Bla g 9 | 191 | Known Allergens |
| QHANACRFWPTGRGI | Bla g 9 | 196 | Known Allergens |
| CRFWPTGRGIYHNDA | Bla g 9 | 201 | Known Allergens |
| TGRGIYHNDAKTFLV | Bla g 9 | 206 | Known Allergens |
| YHNDAKTFLVWCNEE | Bla g 9 | 211 | Known Allergens |
| KTFLVWCNEEDHLRI | Bla g 9 | 216 | Known Allergens |
| WCNEEDHLRIISMQM | Bla g 9 | 221 | Known Allergens |
| DHLRIISMQMGGDLG | Bla g 9 | 226 | Known Allergens |
| ISMQMGGDLGQVYRR | Bla g 9 | 231 | Known Allergens |
| GGDLGQVYRRLVTAV | Bla g 9 | 236 | Known Allergens |
| QVYRRLVTAVNDIEK | Bla g 9 | 241 | Known Allergens |
| LVTAVNDIEKRVPFS | Bla g 9 | 246 | Known Allergens |
| NDIEKRVPFSHDDRL | Bla g 9 | 251 | Known Allergens |
| RVPFSHDDRLGFLTF | Bla g 9 | 256 | Known Allergens |
| HDDRLGFLTFCPTNL | Bla g 9 | 261 | Known Allergens |
| GFLTFCPTNLGTTVR | Bla g 9 | 266 | Known Allergens |
| CPTNLGTTVRASVRI | Bla g 9 | 271 | Known Allergens |
| GTTVRASVRIKVPKL | Bla g 9 | 276 | Known Allergens |
| ASVRIKVPKLAADKK | Bla g 9 | 281 | Known Allergens |
| KVPKLAADKKKLEEV | Bla g 9 | 286 | Known Allergens |
| AADKKKLEEVAGKYN | Bla g 9 | 291 | Known Allergens |
| KLEEVAGKYNLQVRG | Bla g 9 | 296 | Known Allergens |
| AGKYNLQVRGTRGEH | Bla g 9 | 301 | Known Allergens |
| LQVRGTRGEHTEAEG | Bla g 9 | 306 | Known Allergens |
| TRGEHTEAEGGVYDI | Bla g 9 | 311 | Known Allergens |
| TEAEGGVYDISNKRR | Bla g 9 | 316 | Known Allergens |
| GVYDISNKRRMGLTE | Bla g 9 | 321 | Known Allergens |
| SNKRRMGLTEYDAVK | Bla g 9 | 326 | Known Allergens |
| MGLTEYDAVKGMNDG | Bla g 9 | 331 | Known Allergens |
| YDAVKGMNDGIAELI | Bla g 9 | 336 | Known Allergens |
| GMNDGIAELIKIESS | Bla g 9 | 341 | Known Allergens |
| MNDGIAELIKIESSL | Bla g 9 | 342 | Known Allergens |
| MKLFPLVALLVLVVG | Bla g 11 | 1 | Known Allergens |
| LFPLVALLVLVVGVL | Bla g 11 | 3 | Known Allergens |
| ALLVLVVGVLSQKDP | Bla g 11 | 8 | Known Allergens |
| VVGVLSQKDPHVWDG | Bla g 11 | 13 | Known Allergens |
| HVWDGRSAIVHLFEW | Bla g 11 | 23 | Known Allergens |
| RSAIVHLFEWKFADI | Bla g 11 | 28 | Known Allergens |
| KGFAGVQVSPVHENV | Bla g 11 | 53 | Known Allergens |
| VHENVIISSPFRPWW | Bla g 11 | 63 | Known Allergens |
| FRPWWERYQLVSYKL | Bla g 11 | 73 | Known Allergens |
| ERYQLVSYKLVSRSG | Bla g 11 | 78 | Known Allergens |
| RDMVRRCNNVGIRIY | Bla g 11 | 98 | Known Allergens |
| RCNNVGIRIYVDVVL | Bla g 11 | 103 | Known Allergens |
| GIRIYVDVVLNQMSG | Bla g 11 | 108 | Known Allergens |
| VDVVLNQMSGSWPDA | Bla g 11 | 113 | Known Allergens |
| LNQGSDYVRGKMIEY | Bla g 11 | 178 | Known Allergens |
| DYVRGKMIEYLNHLV | Bla g 11 | 183 | Known Allergens |
| KMIEYLNHLVDCGVA | Bla g 11 | 188 | Known Allergens |
| DCGVAGFRVDAAKHM | Bla g 11 | 198 | Known Allergens |
| GFRVDAAKHMWPADL | Bla g 11 | 203 | Known Allergens |
| MKLFPLVALLVLVVG | alpha-amylase | 1 | Literature novel |
| | | | antigens |
| LFPLVALLVLVVGVL | alpha-amylase | 3 | Literature novel |
| | | | antigens |
| ALLVLVVGVLSQKDP | alpha-amylase | 8 | Literature novel |
| | | | antigens |
| VVGVLSQKDPHVWDG | alpha-amylase | 13 | Literature novel |
| | | | antigens |
| HVWDGRSAIVHLFEW | alpha-amylase | 23 | Literature novel |
| | | | antigens |
| RSAIVHLFEWKFADI | alpha-amylase | 28 | Literature novel |
| | | | antigens |
| KGFAGVQVSPVHENV | alpha-amylase | 53 | Literature novel |
| | | | antigens |
| VHENVIISSPFRPWW | alpha-amylase | 63 | Literature novel |
| | | | antigens |
| FRPWWERYQLVSYKL | alpha-amylase | 73 | Literature novel |
| | | | antigens |
| ERYQLVSYKLVSRSG | alpha-amylase | 78 | Literature novel |
| | | | antigens |
| RDMVRRCNNVGIRIY | alpha-amylase | 98 | Literature novel |
| | | | antigens |
| RCNNVGIRIYVDVVL | alpha-amylase | 103 | Literature novel |
| | | | antigens |
| GIRIYVDVVLNQMSG | alpha-amylase | 108 | Literature novel |
| | | | antigens |
| VDVVLNQMSGSWPDA | alpha-amylase | 113 | Literature novel |
| | | | antigens |
| LNQGSDYVRGKMIEY | alpha-amylase | 178 | Literature novel |
| | | | antigens |
| DYVRGKMIEYLNHLV | alpha-amylase | 183 | Literature novel |
| | | | antigens |
| KMIEYLNHLVDCGVA | alpha-amylase | 188 | Literature novel |
| | | | antigens |
| DCGVAGFRVDAAKHM | alpha-amylase | 198 | Literature novel |
| | | | antigens |
| GFRVDAAKHMWPADL | alpha-amylase | 203 | Literature novel |
| | | | antigens |
| AAKHMWPADLQYIYS | alpha-amylase | 208 | Literature novel |
| | | | antigens |
| WPADLQYIYSKVNNL | alpha-amylase | 213 | Literature novel |
| | | | antigens |
| QYIYSKVNNLNTDHG | alpha-amylase | 218 | Literature novel |
| | | | antigens |
| RPFFYQEVIDLGGEA | alpha-amylase | 238 | Literature novel |
| | | | antigens |
| IGDAFRGNNAIKWLV | alpha-amylase | 273 | Literature novel |
| | | | antigens |
| RGNNAIKWLVNFGVG | alpha-amylase | 278 | Literature novel |
| | | | antigens |
| IKWLVNFGVGWGYIP | alpha-amylase | 283 | Literature novel |
| | | | antigens |
| GASILTYKTSKLYKM | alpha-amylase | 318 | Literature novel |
| | | | antigens |
| TYKTSKLYKMAVAFM | alpha-amylase | 323 | Literature novel |
| | | | antigens |
| KLYKMAVAFMLAYPY | alpha-amylase | 328 | Literature novel |
| | | | antigens |
| AVAFMLAYPYGYPRV | alpha-amylase | 333 | Literature novel |
| | | | antigens |
| GYPRVMSSFSFDNSD | alpha-amylase | 343 | Literature novel |
| | | | antigens |
| DGNGNIISPSINADG | alpha-amylase | 363 | Literature novel |
| | | | antigens |
| WVCEHRWRQIFNMVG | alpha-amylase | 383 | Literature novel |
| | | | antigens |
| RWRQIFNMVGFRNAV | alpha-amylase | 388 | Literature novel |
| | | | antigens |
| FNMVGFRNAVAGTAV | alpha-amylase | 393 | Literature novel |
| | | | antigens |
| ISFCRGNKGFVAFND | alpha-amylase | 418 | Literature novel |
| | | | antigens |
| EFNNDLKQTLQTCLP | alpha-amylase | 433 | Literature novel |
| | | | antigens |
| YIEILSSADDGVLAI | alpha-amylase | 478 | Literature novel |
| | | | antigens |
| SSADDGVLAIHVNSK | alpha-amylase | 483 | Literature novel |
| | | | antigens |
| GVLAIHVNSKVGSKS | alpha-amylase | 488 | Literature novel |
| | | | antigens |
| VLEKLEAGFAKLAAS | Arginine kinase | 6 | Literature novel |
| | | | antigens |
| EAGFAKLAASDSKSL | Arginine kinase | 11 | Literature novel |
| | | | antigens |
| KLAASDSKSLLRKYL | Arginine kinase | 16 | Literature novel |
| | | | antigens |
| DSKSLLRKYLTKEVF | Arginine kinase | 21 | Literature novel |
| | | | antigens |
| LRKYLTKEVFDNLKT | Arginine kinase | 26 | Literature novel |
| | | | antigens |
| FGSTLLDVIQSGLEN | Arginine kinase | 46 | Literature novel |
| | | | antigens |
| DAEAYTVFADLFDPI | Arginine kinase | 71 | Literature novel |
| | | | antigens |
| AGEYIISTRVRCGRS | Arginine kinase | 116 | Literature novel |
| | | | antigens |
| RCGRSMQGYPFNPCL | Arginine kinase | 126 | Literature novel |
| | | | antigens |
| LIDDHFLFKEGDRFL | Arginine kinase | 181 | Literature novel |
| | | | antigens |
| FLFKEGDRFLQHANA | Arginine kinase | 186 | Literature novel |
| | | | antigens |
| GDRFLQHANACRFWP | Arginine kinase | 191 | Literature novel |
| | | | antigens |
| TGRGIYHNDAKTFLV | Arginine kinase | 206 | Literature novel |
| | | | antigens |
| WCNEEDHLRIISMQM | Arginine kinase | 221 | Literature novel |
| | | | antigens |
| DHLRIISMQMGGDLG | Arginine kinase | 226 | Literature novel |
| | | | antigens |
| QVYRRLVTAVNDIEK | Arginine kinase | 241 | Literature novel |
| | | | antigens |
| NDIEKRVPFSHDDRL | Arginine kinase | 251 | Literature novel |
| | | | antigens |
| RVPFSHDDRLGFLTF | Arginine kinase | 256 | Literature novel |
| | | | antigens |
| HDDRLGFLTFCPTNL | Arginine kinase | 261 | Literature novel |
| | | | antigens |
| GFLTFCPTNLGTTVR | Arginine kinase | 266 | Literature novel |
| | | | antigens |
| CPTNLGTTVRASVRI | Arginine kinase | 271 | Literature novel |
| | | | antigens |
| GTTVRASVRIKVPKL | Arginine kinase | 276 | Literature novel |
| | | | antigens |
| ASVRIKVPKLAADKK | Arginine kinase | 281 | Literature novel |
| | | | antigens |
| MPLQKLFARRIFDSR | Enolase | 1 | Literature Novel |
| | | | Antigens |
| LFARRIFDSRGNPTI | Enolase | 6 | Literature Novel |
| | | | Antigens |
| EVDLTTDLGLFRAAV | Enolase | 21 | Literature Novel |
| | | | Antigens |
| TDLGLFRAAVPSGAS | Enolase | 26 | Literature Novel |
| | | | Antigens |
| IDNVNKIIVPELLKQ | Enolase | 66 | Literature Novel |
| | | | Antigens |
| ELLKQSFEATQQKEI | Enolase | 76 | Literature Novel |
| | | | Antigens |
| DDFMLKLDGTPNKSK | Enolase | 91 | Literature Novel |
| | | | Antigens |
| PNKSKLGANAILGVS | Enolase | 101 | Literature Novel |
| | | | Antigens |
| LGANAILGVSIAVCK | Enolase | 106 | Literature Novel |
| | | | Antigens |
| KGVPLYRHIADLAGV | Enolase | 126 | Literature Novel |
| | | | Antigens |
| YRHIADLAGVPDVIL | Enolase | 131 | Literature Novel |
| | | | Antigens |
| GVPDVILPVPAFNVI | Enolase | 139 | Literature Novel |
| | | | Antigens |
| PDVILPVPAFNVING | Enolase | 141 | Literature Novel |
| | | | Antigens |
| QEFMILPTGAATFTE | Enolase | 166 | Literature Novel |
| | | | Antigens |
| SEVYHHLKNVIQGKF | Enolase | 186 | Literature Novel |
| | | | Antigens |
| HLKNVIQGKFGLDAT | Enolase | 191 | Literature Novel |
| | | | Antigens |
| IQGKFGLDATAVGDE | Enolase | 196 | Literature Novel |
| | | | Antigens |
| WIDKDQLTALYMEFI | Enolase | 271 | Literature Novel |
| | | | Antigens |
| QLTALYMEFIKEFPV | Enolase | 276 | Literature Novel |
| | | | Antigens |
| YMEFIKEFPVVSIED | Enolase | 281 | Literature Novel |
| | | | Antigens |
| HWDAWTAMTAATPIQ | Enolase | 301 | Literature Novel |
| | | | Antigens |
| TAMTAATPIQIVGDD | Enolase | 306 | Literature Novel |
| | | | Antigens |
| IVGDDLTVTNPTRIQ | Enolase | 316 | Literature Novel |
| | | | Antigens |
| LTVTNPTRIQTAIDK | Enolase | 321 | Literature Novel |
| | | | Antigens |
| KACNCLLLKVNQIGT | Enolase | 336 | Literature Novel |
| | | | Antigens |
| FIADLVVGLSTGQIK | Enolase | 381 | Literature Novel |
| | | | Antigens |
| RSERLAKYNQILRIE | Enolase | 401 | Literature Novel |
| | | | Antigens |
| MAKDIKFDIEARDKL | Hsp60 | 1 | Literature Novel |
| | | | Antigens |
| KKGVDALANAVKVTL | Hsp60 | 16 | Literature Novel |
| | | | Antigens |
| NVVLQKSFGGPQVTK | Hsp60 | 36 | Literature Novel |
| | | | Antigens |
| LEDPIENLGAQMVKE | Hsp60 | 61 | Literature Novel |
| | | | Antigens |
| DGTTTATVLAQAIVR | Hsp60 | 86 | Literature Novel |
| | | | Antigens |
| RALEAVIIDLRKQSR | Hsp60 | 121 | Literature Novel |
| | | | Antigens |
| VIIDLRKQSREVGGN | Hsp60 | 126 | Literature Novel |
| | | | Antigens |
| TEKIKQVASISANND | Hsp60 | 141 | Literature Novel |
| | | | Antigens |
| EGMQFDRGYQSPYFV | Hsp60 | 191 | Literature Novel |
| | | | Antigens |
| SPYFVTNTEKMITEF | Hsp60 | 201 | Literature Novel |
| | | | Antigens |
| DQPQILLSDKKIAAM | Hsp60 | 216 | Literature Novel |
| | | | Antigens |
| LLSDKKIAAMKDLLP | Hsp60 | 221 | Literature Novel |
| | | | Antigens |
| KIAAMKDLLPILEPV | Hsp60 | 226 | Literature Novel |
| | | | Antigens |
| KDLLPILEPVAQSGK | Hsp60 | 231 | Literature Novel |
| | | | Antigens |
| ILEPVAQSGKPLLII | Hsp60 | 236 | Literature Novel |
| | | | Antigens |
| GEALATLVVNKIRGT | Hsp60 | 256 | Literature Novel |
| | | | Antigens |
| TLVVNKIRGTLKVAA | Hsp60 | 261 | Literature Novel |
| | | | Antigens |
| KIRGTLKVAAIKAPG | Hsp60 | 266 | Literature Novel |
| | | | Antigens |
| LKVAAIKAPGFGDRR | Hsp60 | 271 | Literature Novel |
| | | | Antigens |
| KAMLEDIAILTGGSV | Hsp60 | 286 | Literature Novel |
| | | | Antigens |
| DIAILTGGSVISEET | Hsp60 | 291 | Literature Novel |
| | | | Antigens |
| GSKLEDVKLNMLGKA | Hsp60 | 306 | Literature Novel |
| | | | Antigens |
| DVKLNMLGKAERVII | Hsp60 | 311 | Literature Novel |
| | | | Antigens |
| QERLAKLAGGVAVLY | Hsp60 | 366 | Literature Novel |
| | | | Antigens |
| VAVLYVGAASEVEMK | Hsp60 | 376 | Literature Novel |
| | | | Antigens |
| VDDALNATRAAVEEG | Hsp60 | 396 | Literature Novel |
| | | | Antigens |
| IVAGGGVALVRAINS | Hsp60 | 411 | Literature Novel |
| | | | Antigens |
| GVALVRAINSLDNLR | Hsp60 | 416 | Literature Novel |
| | | | Antigens |
| RAINSLDNLRGENAD | Hsp60 | 421 | Literature Novel |
| | | | Antigens |
| QDTGIQIVRRSLEEP | Hsp60 | 436 | Literature Novel |
| | | | Antigens |
| KIGEYKNMIAEGIID | Hsp60 | 481 | Literature Novel |
| | | | Antigens |
| EGIIDPTKVARVALE | Hsp60 | 491 | Literature Novel |
| | | | Antigens |
| PTKVARVALENAASV | Hsp60 | 496 | Literature Novel |
| | | | Antigens |
| RVALENAASVSGMLL | Hsp60 | 501 | Literature Novel |
| | | | Antigens |
| VTEIKKDENNAVPSM | Hsp60 | 521 | Literature Novel |
| | | | Antigens |
| GWVTQIATNPKYPDM | RACK1 | 16 | Literature Novel |
| | | | Antigens |
| KYPDMILSCSRDKTL | RACK1 | 26 | Literature Novel |
| | | | Antigens |
| ILSCSRDKTLIVWKL | RACK1 | 31 | Literature Novel |
| | | | Antigens |
| RDKTLIVWKLTRDET | RACK1 | 36 | Literature Novel |
| | | | Antigens |
| GHSHFVSDVVLSSDG | RACK1 | 61 | Literature Novel |
| | | | Antigens |
| VSDVVLSSDGNYALS | RACK1 | 66 | Literature Novel |
| | | | Antigens |
| LSSDGNYALSGSWDK | RACK1 | 71 | Literature Novel |
| | | | Antigens |
| NYALSGSWDKTLRLW | RACK1 | 76 | Literature Novel |
| | | | Antigens |
| TLRLWDLAAGRTTRR | RACK1 | 86 | Literature Novel |
| | | | Antigens |
| KDVLSVAFSVDNRQI | RACK1 | 106 | Literature Novel |
| | | | Antigens |
| VAFSVDNRQIVSGSR | RACK1 | 111 | Literature Novel |
| | | | Antigens |
| DKTIKLWNTLAECKY | RACK1 | 126 | Literature Novel |
| | | | Antigens |
| VSCVRFSPNHSNPII | RACK1 | 151 | Literature Novel |
| | | | Antigens |
| FSPNHSNPIIVSAGW | RACK1 | 156 | Literature Novel |
| | | | Antigens |
| SNPIIVSAGWDKVVK | RACK1 | 161 | Literature Novel |
| | | | Antigens |
| DKVVKVWNLTNCKLK | RACK1 | 171 | Literature Novel |
| | | | Antigens |
| VWNLTNCKLKINHIG | RACK1 | 176 | Literature Novel |
| | | | Antigens |
| NCKLKINHIGHTGYL | RACK1 | 181 | Literature Novel |
| | | | Antigens |
| GKDCKAMLWDLNDGK | RACK1 | 211 | Literature Novel |
| | | | Antigens |
| AMLWDLNDGKHLHTL | RACK1 | 216 | Literature Novel |
| | | | Antigens |
| DHNDIITALCFSPNR | RACK1 | 231 | Literature Novel |
| | | | Antigens |
| ITALCFSPNRYWLCA | RACK1 | 236 | Literature Novel |
| | | | Antigens |
| YWLCAAFGPSIKIWD | RACK1 | 246 | Literature Novel |
| | | | Antigens |
| QTLFAGYFDNTIRVW | RACK1 | 296 | Literature Novel |
| | | | Antigens |
| GYFDNTIRVWQVSVF | RACK1 | 301 | Literature Novel |
| | | | Antigens |
| FDNTIRVWQVSVFAR | RACK1 | 303 | Literature Novel |
| | | | Antigens |
| MGRKFWVGGNWKMNG | TPI | 1 | Literature Novel |
| | | | Antigens |
| EEIVKFLAAGPLDPN | TPI | 21 | Literature Novel |
| | | | Antigens |
| VEVVVGIPAIYLEST | TPI | 36 | Literature Novel |
| | | | Antigens |
| GIPAIYLESTKNILP | TPI | 41 | Literature Novel |
| | | | Antigens |
| YLESTKNILPSNVAA | TPI | 46 | Literature Novel |
| | | | Antigens |
| KNILPSNVAAAAQNC | TPI | 51 | Literature Novel |
| | | | Antigens |
| GAFTGEISPAMLNDI | TPI | 71 | Literature Novel |
| | | | Antigens |
| EISPAMLNDIGINWV | TPI | 76 | Literature Novel |
| | | | Antigens |
| MLNDIGINWVILGHS | TPI | 81 | Literature Novel |
| | | | Antigens |
| GINWVILGHSERRNV | TPI | 86 | Literature Novel |
| | | | Antigens |
| FGEKDDLISDKVVHA | TPI | 101 | Literature Novel |
| | | | Antigens |
| DLISDKVVHALESGL | TPI | 106 | Literature Novel |
| | | | Antigens |
| KVVHALESGLNVVAC | TPI | 111 | Literature Novel |
| | | | Antigens |
| GKTEEVVFQQTKAIA | TPI | 136 | Literature Novel |
| | | | Antigens |
| VVFQQTKAIADKIKD | TPI | 141 | Literature Novel |
| | | | Antigens |
| DKIKDWSKVVIAYEP | TPI | 151 | Literature Novel |
| | | | Antigens |
| WSKVVIAYEPVWAIG | TPI | 156 | Literature Novel |
| | | | Antigens |
| IAYEPVWAIGTGKTA | TPI | 161 | Literature Novel |
| | | | Antigens |
| QDVHKKLREWLSKNV | TPI | 181 | Literature Novel |
| | | | Antigens |
| DGFLVGGASLKPEFV | TPI | 226 | Literature Novel |
| | | | Antigens |
| GGASLKPEFVQIINA | TPI | 231 | Literature Novel |
| | | | Antigens |
| ASLKPEFVQIINAKN | TPI | 233 | Literature Novel |
| | | | Antigens |
| MFRLVVIATLLVASC | Trypsin | 1 | Literature Novel |
| | | | Antigens |
| VIATLLVASCLGAAT | Trypsin | 6 | Literature Novel |
| | | | Antigens |
| QLQFEYYGSLMCGAS | Trypsin | 46 | Literature Novel |
| | | | Antigens |
| YWTIDFDIAVARVST | Trypsin | 111 | Literature Novel |
| | | | Antigens |
| DYDGITANMICAAVP | Trypsin | 186 | Literature Novel |
| | | | Antigens |
| YPGVYSNVATLRDFV | Trypsin | 236 | Literature Novel |
| | | | Antigens |
| MTWNALLCCLLVSAA | Vitellogenin | 1 | Literature Novel |
| | | | Antigens |
| NALLCCLLVSAASAI | Vitellogenin | 4 | Literature Novel |
| | | | Antigens |
| AASAITPGWLPINSQ | Vitellogenin | 14 | Literature Novel |
| | | | Antigens |
| VANQYTGILYKARLS | Vitellogenin | 44 | Literature Novel |
| | | | Antigens |
| KARLSLDRNEDQLIT | Vitellogenin | 54 | Literature Novel |
| | | | Antigens |
| LDRNEDQLITGKVTE | Vitellogenin | 59 | Literature Novel |
| | | | Antigens |
| DQLITGKVTEAQFSP | Vitellogenin | 64 | Literature Novel |
| | | | Antigens |
| GKVTEAQFSPVNTQF | Vitellogenin | 69 | Literature Novel |
| | | | Antigens |
| AQFSPVNTQFSSGWD | Vitellogenin | 74 | Literature Novel |
| | | | Antigens |
| VNTQFSSGWDESVPD | Vitellogenin | 79 | Literature Novel |
| | | | Antigens |
| SSGWDESVPDEKLHW | Vitellogenin | 84 | Literature Novel |
| | | | Antigens |
| ESVPDEKLHWDVVPM | Vitellogenin | 89 | Literature Novel |
| | | | Antigens |
| QIELNSRGEVRKLRV | Vitellogenin | 109 | Literature Novel |
| | | | Antigens |
| VVVDEDKKVYRVFES | Vitellogenin | 144 | Literature Novel |
| | | | Antigens |
| RVFESTVTGRCEALY | Vitellogenin | 154 | Literature Novel |
| | | | Antigens |
| TVTGRCEALYEVDHL | Vitellogenin | 159 | Literature Novel |
| | | | Antigens |
| CEALYEVDHLYPTTY | Vitellogenin | 164 | Literature Novel |
| | | | Antigens |
| EVDHLYPTTYLNPWQ | Vitellogenin | 169 | Literature Novel |
| | | | Antigens |
| YPTTYLNPWQWTQQH | Vitellogenin | 174 | Literature Novel |
| | | | Antigens |
| LNPWQWTQQHDTKLR | Vitellogenin | 179 | Literature Novel |
| | | | Antigens |
| WTQQHDTKLRIMKTH | Vitellogenin | 184 | Literature Novel |
| | | | Antigens |
| DTKLRIMKTHQFTNC | Vitellogenin | 189 | Literature Novel |
| | | | Antigens |
| IMKTHQFTNCRHNSA | Vitellogenin | 194 | Literature Novel |
| | | | Antigens |
| NAFEYFHLKQHKPET | Vitellogenin | 214 | Literature Novel |
| | | | Antigens |
| AVSRVIADGDNLKNF | Vitellogenin | 234 | Literature Novel |
| | | | Antigens |
| IADGDNLKNFTFYSG | Vitellogenin | 239 | Literature Novel |
| | | | Antigens |
| IVLNPEIYNKQKGML | Vitellogenin | 259 | Literature Novel |
| | | | Antigens |
| VSHINVTVERKGREL | Vitellogenin | 274 | Literature Novel |
| | | | Antigens |
| VTVERKGRELTVIDY | Vitellogenin | 279 | Literature Novel |
| | | | Antigens |
| ELRNVGDLSYSTSLV | Vitellogenin | 294 | Literature Novel |
| | | | Antigens |
| RNSASMDLSSSSMSS | Vitellogenin | 314 | Literature Novel |
| | | | Antigens |
| MDLSSSSMSSSSSSS | Vitellogenin | 319 | Literature Novel |
| | | | Antigens |
| SSMSSSSSSSSSSSS | Vitellogenin | 324 | Literature Novel |
| | | | Antigens |
| SSSSSSSSSSSSSSS | Vitellogenin | 329 | Literature Novel |
| | | | Antigens |
| SSSSSSSSSSSSSSS | Vitellogenin | 334 | Literature Novel |
| | | | Antigens |
| SSSSSSSSSSSEEHH | Vitellogenin | 339 | Literature Novel |
| | | | Antigens |
| SSSSSSEEHHSHNQK | Vitellogenin | 344 | Literature Novel |
| | | | Antigens |
| SEEHHSHNQKLSKKR | Vitellogenin | 349 | Literature Novel |
| | | | Antigens |
| QVPLPRPLFEANFDA | Vitellogenin | 364 | Literature Novel |
| | | | Antigens |
| RPLFEANFDASSGLT | Vitellogenin | 369 | Literature Novel |
| | | | Antigens |
| ANFDASSGLTTEQPV | Vitellogenin | 374 | Literature Novel |
| | | | Antigens |
| SSGLTTEQPVTFRPR | Vitellogenin | 379 | Literature Novel |
| | | | Antigens |
| TEQPVTFRPRRQLFQ | Vitellogenin | 384 | Literature Novel |
| | | | Antigens |
| TFRPRRQLFQGQDMS | Vitellogenin | 389 | Literature Novel |
| | | | Antigens |
| RQLFQGQDMSEEETE | Vitellogenin | 394 | Literature Novel |
| | | | Antigens |
| GQDMSEEETEQNPEI | Vitellogenin | 399 | Literature Novel |
| | | | Antigens |
| EEETEQNPEIIPANL | Vitellogenin | 404 | Literature Novel |
| | | | Antigens |
| LIHNTKQVDVDPVGV | Vitellogenin | 424 | Literature Novel |
| | | | Antigens |
| KQVDVDPVGVAVRLS | Vitellogenin | 429 | Literature Novel |
| | | | Antigens |
| KDIAADLQGEPRVGE | Vitellogenin | 444 | Literature Novel |
| | | | Antigens |
| DLQGEPRVGEDRHIL | Vitellogenin | 449 | Literature Novel |
| | | | Antigens |
| PRVGEDRHILPRFTI | Vitellogenin | 454 | Literature Novel |
| | | | Antigens |
| AARKLYKLENDHPNY | Vitellogenin | 484 | Literature Novel |
| | | | Antigens |
| DHPNYMNWDTWRVYR | Vitellogenin | 494 | Literature Novel |
| | | | Antigens |
| MNWDTWRVYRDAVSQ | Vitellogenin | 499 | Literature Novel |
| | | | Antigens |
| WRVYRDAVSQAGTWS | Vitellogenin | 504 | Literature Novel |
| | | | Antigens |
| DAVSQAGTWSALNSI | Vitellogenin | 509 | Literature Novel |
| | | | Antigens |
| SEMVEPKEASHLITV | Vitellogenin | 529 | Literature Novel |
| | | | Antigens |
| LPAAVSDKNKAYLHF | Vitellogenin | 544 | Literature Novel |
| | | | Antigens |
| SDKNKAYLHFLFEMT | Vitellogenin | 549 | Literature Novel |
| | | | Antigens |
| IPYLVQEFDDAVKEN | Vitellogenin | 604 | Literature Novel |
| | | | Antigens |
| EHNPRKVIDLLLSLY | Vitellogenin | 669 | Literature Novel |
| | | | Antigens |
| LDQNEHADIRVEALF | Vitellogenin | 684 | Literature Novel |
| | | | Antigens |
| AELTHTESNNQVLSA | Vitellogenin | 714 | Literature Novel |
| | | | Antigens |
| TESNNQVLSASQSAI | Vitellogenin | 719 | Literature Novel |
| | | | Antigens |
| SQSAIKSAANVEGDI | Vitellogenin | 729 | Literature Novel |
| | | | Antigens |
| KSAANVEGDIYSEMR | Vitellogenin | 734 | Literature Novel |
| | | | Antigens |
| VEGDIYSEMRRKAKA | Vitellogenin | 739 | Literature Novel |
| | | | Antigens |
| RKAKAVEHLLSTRNM | Vitellogenin | 749 | Literature Novel |
| | | | Antigens |
| KINYDSLYNLNYIGS | Vitellogenin | 779 | Literature Novel |
| | | | Antigens |
| SLYNLNYIGSEDSIY | Vitellogenin | 784 | Literature Novel |
| | | | Antigens |
| NYIGSEDSIYPKSML | Vitellogenin | 789 | Literature Novel |
| | | | Antigens |
| NNLGRINTHVQKGYM | Vitellogenin | 809 | Literature Novel |
| | | | Antigens |
| INTHVQKGYMVSSMT | Vitellogenin | 814 | Literature Novel |
| | | | Antigens |
| VSSMTDLWEAFHTIY | Vitellogenin | 824 | Literature Novel |
| | | | Antigens |
| FHTIYKKDNGSPTDP | Vitellogenin | 834 | Literature Novel |
| | | | Antigens |
| KKDNGSPTDPKTLVK | Vitellogenin | 839 | Literature Novel |
| | | | Antigens |
| SPTDPKTLVKFVEGN | Vitellogenin | 844 | Literature Novel |
| | | | Antigens |
| FVEGNLKYFNMGVQK | Vitellogenin | 854 | Literature Novel |
| | | | Antigens |
| KTYKKPTNFNHTKLS | Vitellogenin | 889 | Literature Novel |
| | | | Antigens |
| TLTLPCAMGLPAYFK | Vitellogenin | 909 | Literature Novel |
| | | | Antigens |
| CAMGLPAYFKMNSPS | Vitellogenin | 914 | Literature Novel |
| | | | Antigens |
| LWKYNGEFSIQTDAK | Vitellogenin | 929 | Literature Novel |
| | | | Antigens |
| QTDAKTDVPMSLENF | Vitellogenin | 939 | Literature Novel |
| | | | Antigens |
| HAQLAFSTAFDNKEY | Vitellogenin | 969 | Literature Novel |
| | | | Antigens |
| FSTAFDNKEYISGLD | Vitellogenin | 974 | Literature Novel |
| | | | Antigens |
| DNKEYISGLDRKVEV | Vitellogenin | 979 | Literature Novel |
| | | | Antigens |
| ISGLDRKVEVHVPVK | Vitellogenin | 984 | Literature Novel |
| | | | Antigens |
| IIPLFTDRDYDVLQW | Vitellogenin | 1014 | Literature Novel |
| | | | Antigens |
| TDRDYDVLQWQTIPY | Vitellogenin | 1019 | Literature Novel |
| | | | Antigens |
| TTIHNVPDFETVYMD | Vitellogenin | 1034 | Literature Novel |
| | | | Antigens |
| TAHFEKKMGENTGIV | Vitellogenin | 1059 | Literature Novel |
| | | | Antigens |
| KKMGENTGIVFKVKY | Vitellogenin | 1064 | Literature Novel |
| | | | Antigens |
| DTDQEFLDTKWFLDE | Vitellogenin | 1079 | Literature Novel |
| | | | Antigens |
| LFTGLNYDVPTKDIF | Vitellogenin | 1099 | Literature Novel |
| | | | Antigens |
| NYDVPTKDIFYNNLT | Vitellogenin | 1104 | Literature Novel |
| | | | Antigens |
| YNNLTVYYDHEDTKN | Vitellogenin | 1114 | Literature Novel |
| | | | Antigens |
| VYYDHEDTKNHAVSF | Vitellogenin | 1119 | Literature Novel |
| | | | Antigens |
| EDTKNHAVSFTVTKE | Vitellogenin | 1124 | Literature Novel |
| | | | Antigens |
| HAVSFTVTKEQSKFY | Vitellogenin | 1129 | Literature Novel |
| | | | Antigens |
| TVTKEQSKFYETLNP | Vitellogenin | 1134 | Literature Novel |
| | | | Antigens |
| LKLSSGKKQKHRNVK | Vitellogenin | 1154 | Literature Novel |
| | | | Antigens |
| GKKQKHRNVKSHRIR | Vitellogenin | 1159 | Literature Novel |
| | | | Antigens |
| SHRIRREYTEDENPA | Vitellogenin | 1169 | Literature Novel |
| | | | Antigens |
| REYTEDENPAIPKDK | Vitellogenin | 1174 | Literature Novel |
| | | | Antigens |
| DENPAIPKDKQPNSH | Vitellogenin | 1179 | Literature Novel |
| | | | Antigens |
| IPKDKQPNSHPRRQE | Vitellogenin | 1184 | Literature Novel |
| | | | Antigens |
| QPNSHPRRQEYLSKS | Vitellogenin | 1189 | Literature Novel |
| | | | Antigens |
| MALTGDATAVVLDMT | Vitellogenin | 1204 | Literature Novel |
| | | | Antigens |
| VLDMTLKFEGPAESY | Vitellogenin | 1214 | Literature Novel |
| | | | Antigens |
| LKFEGPAESYFTTTV | Vitellogenin | 1219 | Literature Novel |
| | | | Antigens |
| FYDQHYYEEKKRNQF | Vitellogenin | 1249 | Literature Novel |
| | | | Antigens |
| YYEEKKRNQFCLSWS | Vitellogenin | 1254 | Literature Novel |
| | | | Antigens |
| EFDPNSKVHAIMNIG | Vitellogenin | 1284 | Literature Novel |
| | | | Antigens |
| IMNIGKECENGGSAV | Vitellogenin | 1294 | Literature Novel |
| | | | Antigens |
| KECENGGSAVANIDM | Vitellogenin | 1299 | Literature Novel |
| | | | Antigens |
| KNLTVSKLCDHEMRT | Vitellogenin | 1324 | Literature Novel |
| | | | Antigens |
| SKLCDHEMRTKRDHV | Vitellogenin | 1329 | Literature Novel |
| | | | Antigens |
| HEMRTKRDHVLPACR | Vitellogenin | 1334 | Literature Novel |
| | | | Antigens |
| KRDHVLPACRNSTER | Vitellogenin | 1339 | Literature Novel |
| | | | Antigens |
| LPACRNSTERASDLN | Vitellogenin | 1344 | Literature Novel |
| | | | Antigens |
| NSTERASDLNRVHVD | Vitellogenin | 1349 | Literature Novel |
| | | | Antigens |
| INYNLKQHETFKRRV | Vitellogenin | 1364 | Literature Novel |
| | | | Antigens |
| KQHETFKRRVYKVYD | Vitellogenin | 1369 | Literature Novel |
| | | | Antigens |
| LYPHVSEDVIVDNPA | Vitellogenin | 1389 | Literature Novel |
| | | | Antigens |
| DNTRAFNVSIETPVL | Vitellogenin | 1414 | Literature Novel |
| | | | Antigens |
| FNVSIETPVLSVNAT | Vitellogenin | 1419 | Literature Novel |
| | | | Antigens |
| ETPVLSVNATSVRLQ | Vitellogenin | 1424 | Literature Novel |
| | | | Antigens |
| SVNATSVRLQSWQSE | Vitellogenin | 1429 | Literature Novel |
| | | | Antigens |
| SVRLQSWQSEMLRMN | Vitellogenin | 1434 | Literature Novel |
| | | | Antigens |
| PRTSFAKRFAKWALP | Vitellogenin | 1449 | Literature Novel |
| | | | Antigens |
| AKRFAKWALPLYYKP | Vitellogenin | 1454 | Literature Novel |
| | | | Antigens |
| KWALPLYYKPTCVVD | Vitellogenin | 1459 | Literature Novel |
| | | | Antigens |
| LYYKPTCVVDSSYIN | Vitellogenin | 1464 | Literature Novel |
| | | | Antigens |
| TCVVDSSYINTFDNF | Vitellogenin | 1469 | Literature Novel |
| | | | Antigens |
| ILDIPQKFNMEYFKV | Vitellogenin | 1499 | Literature Novel |
| | | | Antigens |
| AFKPTSPVPNMQREV | Vitellogenin | 1514 | Literature Novel |
| | | | Antigens |
| SPVPNMQREVLVFLR | Vitellogenin | 1519 | Literature Novel |
| | | | Antigens |
| NAKIELKPNQGMPEV | Vitellogenin | 1534 | Literature Novel |
| | | | Antigens |
| LKPNQGMPEVYVEGK | Vitellogenin | 1539 | Literature Novel |
| | | | Antigens |
| GMPEVYVEGKRVDYN | Vitellogenin | 1544 | Literature Novel |
| | | | Antigens |
| YVEGKRVDYNHHHST | Vitellogenin | 1549 | Literature Novel |
| | | | Antigens |
| RVDYNHHHSTDLNVS | Vitellogenin | 1554 | Literature Novel |
| | | | Antigens |
| HHHSTDLNVSQDRIG | Vitellogenin | 1559 | Literature Novel |
| | | | Antigens |
| DLNVSQDRIGYVYAL | Vitellogenin | 1564 | Literature Novel |
| | | | Antigens |
| QDRIGYVYALPTKAA | Vitellogenin | 1569 | Literature Novel |
| | | | Antigens |
| YVYALPTKAAHIVFP | Vitellogenin | 1574 | Literature Novel |
| | | | Antigens |
| PTKAAHIVFPSYEIE | Vitellogenin | 1579 | Literature Novel |
| | | | Antigens |
| HIVFPSYEIEMFYDG | Vitellogenin | 1584 | Literature Novel |
| | | | Antigens |
| SYEIEMFYDGSRIMI | Vitellogenin | 1589 | Literature Novel |
| | | | Antigens |
| MFYDGSRIMIQASNM | Vitellogenin | 1594 | Literature Novel |
| | | | Antigens |
| SRIMIQASNMYRNFT | Vitellogenin | 1599 | Literature Novel |
| | | | Antigens |
| QASNMYRNFTKGLCG | Vitellogenin | 1604 | Literature Novel |
| | | | Antigens |
| YRNFTKGLCGNMDGE | Vitellogenin | 1609 | Literature Novel |
| | | | Antigens |
| KGLCGNMDGEFVNDV | Vitellogenin | 1614 | Literature Novel |
| | | | Antigens |
| NMDGEFVNDVLTPWG | Vitellogenin | 1619 | Literature Novel |
| | | | Antigens |
| FVNDVLTPWGCYAKD | Vitellogenin | 1624 | Literature Novel |
| | | | Antigens |
| LTPWGCYAKDMALFV | Vitellogenin | 1629 | Literature Novel |
| | | | Antigens |
| CYAKDMALFVASYAD | Vitellogenin | 1634 | Literature Novel |
| | | | Antigens |
| MALFVASYADNSNSE | Vitellogenin | 1639 | Literature Novel |
| | | | Antigens |
| ASYADNSNSEVRKIK | Vitellogenin | 1644 | Literature Novel |
| | | | Antigens |
| NSNSEVRKIKATQNE | Vitellogenin | 1649 | Literature Novel |
| | | | Antigens |
| VRKIKATQNEQTCVP | Vitellogenin | 1654 | Literature Novel |
| | | | Antigens |
| ATQNEQTCVPQFHQP | Vitellogenin | 1659 | Literature Novel |
| | | | Antigens |
| QTCVPQFHQPLVSHQ | Vitellogenin | 1664 | Literature Novel |
| | | | Antigens |
| QFHQPLVSHQMRLSQ | Vitellogenin | 1669 | Literature Novel |
| | | | Antigens |
| LVSHQMRLSQVIKLA | Vitellogenin | 1674 | Literature Novel |
| | | | Antigens |
| MRLSQVIKLADTSSS | Vitellogenin | 1679 | Literature Novel |
| | | | Antigens |
| VIKLADTSSSSESSS | Vitellogenin | 1684 | Literature Novel |
| | | | Antigens |
| DTSSSSESSSSSESH | Vitellogenin | 1689 | Literature Novel |
| | | | Antigens |
| SESSSSSESHENNSS | Vitellogenin | 1694 | Literature Novel |
| | | | Antigens |
| SSESHENNSSPSSES | Vitellogenin | 1699 | Literature Novel |
| | | | Antigens |
| ENNSSPSSESQVNKS | Vitellogenin | 1704 | Literature Novel |
| | | | Antigens |
| PSSESQVNKSKRQPN | Vitellogenin | 1709 | Literature Novel |
| | | | Antigens |
| QVNKSKRQPNSRPRS | Vitellogenin | 1714 | Literature Novel |
| | | | Antigens |
| KRQPNSRPRSSSSSS | Vitellogenin | 1719 | Literature Novel |
| | | | Antigens |
| SRPRSSSSSSSSSSS | Vitellogenin | 1724 | Literature Novel |
| | | | Antigens |
| SSSSSSSSSSESNES | Vitellogenin | 1729 | Literature Novel |
| | | | Antigens |
| SSSSSESNESVLAKK | Vitellogenin | 1734 | Literature Novel |
| | | | Antigens |
| ESNESVLAKKIINNQ | Vitellogenin | 1739 | Literature Novel |
| | | | Antigens |
| VLAKKIINNQIGPKP | Vitellogenin | 1744 | Literature Novel |
| | | | Antigens |
| IINNQIGPKPTLIPS | Vitellogenin | 1749 | Literature Novel |
| | | | Antigens |
| IGPKPTLIPSQSPMT | Vitellogenin | 1754 | Literature Novel |
| | | | Antigens |
| TLIPSQSPMTSDDKC | Vitellogenin | 1759 | Literature Novel |
| | | | Antigens |
| QSPMTSDDKCMTQQP | Vitellogenin | 1764 | Literature Novel |
| | | | Antigens |
| SDDKCMTQQPRHTYY | Vitellogenin | 1769 | Literature Novel |
| | | | Antigens |
| MTQQPRHTYYENQFC | Vitellogenin | 1774 | Literature Novel |
| | | | Antigens |
| RHTYYENQFCVSEKP | Vitellogenin | 1779 | Literature Novel |
| | | | Antigens |
| ENQFCVSEKPLDTCM | Vitellogenin | 1784 | Literature Novel |
| | | | Antigens |
| VSEKPLDTCMPLICH | Vitellogenin | 1789 | Literature Novel |
| | | | Antigens |
| LDTCMPLICHATESY | Vitellogenin | 1794 | Literature Novel |
| | | | Antigens |
| PLICHATESYTIDVN | Vitellogenin | 1799 | Literature Novel |
| | | | Antigens |
| ATESYTIDVNFYCVP | Vitellogenin | 1804 | Literature Novel |
| | | | Antigens |
| TIDVNFYCVPLGPAA | Vitellogenin | 1809 | Literature Novel |
| | | | Antigens |
| FYCVPLGPAANHYMK | Vitellogenin | 1814 | Literature Novel |
| | | | Antigens |
| LGPAANHYMKLVKKG | Vitellogenin | 1819 | Literature Novel |
| | | | Antigens |
| NHYMKLVKKGILPDL | Vitellogenin | 1824 | Literature Novel |
| | | | Antigens |
| LVKKGILPDLSRNRN | Vitellogenin | 1829 | Literature Novel |
| | | | Antigens |
| ILPDLSRNRNGKRVV | Vitellogenin | 1834 | Literature Novel |
| | | | Antigens |
| SRNRNGKRVVLPVEI | Vitellogenin | 1839 | Literature Novel |
| | | | Antigens |
| GKRVVLPVEIPIQCE | Vitellogenin | 1844 | Literature Novel |
| | | | Antigens |
| VLPVEIPIQCEPVLN | Vitellogenin | 1849 | Literature Novel |
| | | | Antigens |
| SCITYQRGSHAGNKL | Enolase | 11 | Literature Novel |
| | | | Antigens |
| AGNKLAMQEFMILPT | Enolase | 21 | Literature Novel |
| | | | Antigens |
| NKLAMQEFMILPTGA | Enolase | 23 | Literature Novel |
| | | | Antigens |
| AMQEFMILPTGAATF | Enolase | 26 | Literature Novel |
| | | | Antigens |
| MGSEVYHHLKNVIKG | Enolase | 46 | Literature Novel |
| | | | Antigens |
| YHHLKNVIKGKFGLD | Enolase | 51 | Literature Novel |
| | | | Antigens |
| KDGLDLIKDAIEKAG | Enolase | 83 | Literature Novel |
| | | | Antigens |
| LDLIKDAIEKAGYTG | Enolase | 86 | Literature Novel |
| | | | Antigens |
| LIKDAIEKAGYTGKI | Enolase | 88 | Literature Novel |
| | | | Antigens |
| KIEIGMDVAASEFFR | Enolase | 101 | Literature Novel |
| | | | Antigens |
| KYDLDFKNPNTDKSK | Enolase | 118 | Literature Novel |
| | | | Antigens |
| SKWIDKDQLTALYME | Enolase | 131 | Literature Novel |
| | | | Antigens |
| KDQLTALYMEFIKEF | Enolase | 136 | Literature Novel |
| | | | Antigens |
| ALYMEFIKEFPVVSI | Enolase | 141 | Literature Novel |
| | | | Antigens |
| FIKEFPVVSIEDPFD | Enolase | 146 | Literature Novel |
| | | | Antigens |
| QDHWDAWTAMTAATP | Enolase | 161 | Literature Novel |
| | | | Antigens |
| AWTAMTAATPIQIVG | Enolase | 166 | Literature Novel |
| | | | Antigens |
| DDLTVTNPTRIQTAI | Enolase | 181 | Literature Novel |
| | | | Antigens |
| NCLLLKVNQIGTVTE | Enolase | 201 | Literature Novel |
| | | | Antigens |
| LLLKVNQIGTVTESI | Enolase | 203 | Literature Novel |
| | | | Antigens |
| GTVTESIQAHTLAKA | Enolase | 211 | Literature Novel |
| | | | Antigens |
| VTESIQAHTLAKANG | Enolase | 213 | Literature Novel |
| | | | Antigens |
| NGWGTMVSHRSGETE | Enolase | 226 | Literature Novel |
| | | | Antigens |
| WGTMVSHRSGETEDS | Enolase | 228 | Literature Novel |
| | | | Antigens |
| ETEDSFIADLVVGLS | Enolase | 238 | Literature Novel |
| | | | Antigens |
| DSFIADLVVGLSTGQ | Enolase | 241 | Literature Novel |
| | | | Antigens |
| PCRSERLAKYNQILR | Enolase | 261 | Literature Novel |
| | | | Antigens |
| RLAKYNQILRIEEEL | Enolase | 266 | Literature Novel |
| | | | Antigens |
| AKYNQILRIEEELGD | Enolase | 268 | Literature Novel |
| | | | Antigens |
| NALLCCLLVSAASAI | NBGA1 | 26 | Novel antigens |
| ALLCCLLVSAASAIT | NBGA1 | 27 | Novel antigens |
| CLLVSAASAITPGWL | NBGA1 | 31 | Novel antigens |
| TPGWLPINSQLDYHV | NBGA1 | 41 | Novel antigens |
| PINSQLDYHVHGRTF | NBGA1 | 46 | Novel antigens |
| LDYHVHGRTFSSLFQ | NBGA1 | 51 | Novel antigens |
| HGRTFSSLFQVANQY | NBGA1 | 56 | Novel antigens |
| SSLFQVANQYTGILY | NBGA1 | 61 | Novel antigens |
| TGILYKARLSLDRNE | NBGA1 | 71 | Novel antigens |
| EKLHWDVVPMSQQPF | NBGA1 | 116 | Novel antigens |
| DVVPMSQQPFQIELN | NBGA1 | 121 | Novel antigens |
| SQQPFQIELNSRGEV | NBGA1 | 126 | Novel antigens |
| SRGEVRKLRVNKFVE | NBGA1 | 136 | Novel antigens |
| RKLRVNKFVELWEIN | NBGA1 | 141 | Novel antigens |
| NKFVELWEINMIKAI | NBGA1 | 146 | Novel antigens |
| LWEINMIKAIISQLQ | NBGA1 | 151 | Novel antigens |
| MIKAIISQLQVVVDE | NBGA1 | 156 | Novel antigens |
| ISQLQVVVDEDKKVY | NBGA1 | 161 | Novel antigens |
| DKKVYRVFESTVTGR | NBGA1 | 171 | Novel antigens |
| DTKLRIMKNHQFTNC | NBGA1 | 211 | Novel antigens |
| QFTNCRHNSAYKLHF | NBGA1 | 221 | Novel antigens |
| RHNSAYKLHFNAFEY | NBGA1 | 226 | Novel antigens |
| YKLHFNAFEYFHLKQ | NBGA1 | 231 | Novel antigens |
| FHLKQHKPETFLSNS | NBGA1 | 241 | Novel antigens |
| HKPETFLSNSAVSRV | NBGA1 | 246 | Novel antigens |
| FLSNSAVSRVIADGD | NBGA1 | 251 | Novel antigens |
| NLKNFTFYSGETIHK | NBGA1 | 266 | Novel antigens |
| TFYSGETIHKIVLNP | NBGA1 | 271 | Novel antigens |
| ETIHKIVLNPEIYNK | NBGA1 | 276 | Novel antigens |
| EIYNKQKGMLVSHIN | NBGA1 | 286 | Novel antigens |
| QKGMLVSHINVTVER | NBGA1 | 291 | Novel antigens |
| KGRELTVIDYELRNV | NBGA1 | 306 | Novel antigens |
| TVIDYELRNVGDLSY | NBGA1 | 311 | Novel antigens |
| GDLSYSTSLVKAHSM | NBGA1 | 321 | Novel antigens |
| STSLVKAHSMRNSAS | NBGA1 | 326 | Novel antigens |
| KAHSMRNSASMDLSS | NBGA1 | 331 | Novel antigens |
| SHNQKLSKKRQVPLP | NBGA1 | 376 | Novel antigens |
| LSKKRQVPLPRPLFE | NBGA1 | 381 | Novel antigens |
| QNPEIIPANLLPTYN | NBGA1 | 431 | Novel antigens |
| IPANLLPTYNLIHNT | NBGA1 | 436 | Novel antigens |
| LPTYNLIHNTKQVDV | NBGA1 | 441 | Novel antigens |
| DPVGVAVRLSKDIAA | NBGA1 | 456 | Novel antigens |
| AVRLSKDIAADLQGE | NBGA1 | 461 | Novel antigens |
| DRHILPRFTILVRLL | NBGA1 | 481 | Novel antigens |
| PRFTILVRLLKQLKV | NBGA1 | 486 | Novel antigens |
| LVRLLKQLKVSQIME | NBGA1 | 491 | Novel antigens |
| KQLKVSQIMEAARKL | NBGA1 | 496 | Novel antigens |
| SQIMEAARKLYKLEN | NBGA1 | 501 | Novel antigens |
| YKLENDHPNYMNWDT | NBGA1 | 511 | Novel antigens |
| AGTWSALNSIQQFIS | NBGA1 | 536 | Novel antigens |
| ALNSIQQFISSEMVE | NBGA1 | 541 | Novel antigens |
| QQFISSEMVEPKEAS | NBGA1 | 546 | Novel antigens |
| PKEASHLITVLPAAV | NBGA1 | 556 | Novel antigens |
| HLITVLPAAVSDKNK | NBGA1 | 561 | Novel antigens |
| AYLHFLFEMTKDPVF | NBGA1 | 576 | Novel antigens |
| LFEMTKDPVFKNMTY | NBGA1 | 581 | Novel antigens |
| KDPVFKNMTYVNTSL | NBGA1 | 586 | Novel antigens |
| KNMTYVNTSLVLAFS | NBGA1 | 591 | Novel antigens |
| VNTSLVLAFSEVIHQ | NBGA1 | 596 | Novel antigens |
| VLAFSEVIHQVEMHQ | NBGA1 | 601 | Novel antigens |
| EVIHQVEMHQVRDLK | NBGA1 | 606 | Novel antigens |
| VEMHQVRDLKIKSVY | NBGA1 | 611 | Novel antigens |
| VRDLKIKSVYIPYLV | NBGA1 | 616 | Novel antigens |
| IKSVYIPYLVQEFDD | NBGA1 | 621 | Novel antigens |
| QEFDDAVKENNSIKI | NBGA1 | 631 | Novel antigens |
| AVKENNSIKIQLYTH | NBGA1 | 636 | Novel antigens |
| NSIKIQLYTHALGVT | NBGA1 | 641 | Novel antigens |
| QLYTHALGVTGNTHI | NBGA1 | 646 | Novel antigens |
| ALGVTGNTHILHYLR | NBGA1 | 651 | Novel antigens |
| GNTHILHYLRPYIIQ | NBGA1 | 656 | Novel antigens |
| LHYLRPYIIQLKTIT | NBGA1 | 661 | Novel antigens |
| PYIIQLKTITHHQRL | NBGA1 | 666 | Novel antigens |
| LKTITHHQRLFMVQS | NBGA1 | 671 | Novel antigens |
| HHQRLFMVQSLERVV | NBGA1 | 676 | Novel antigens |
| FMVQSLERVVEHNPR | NBGA1 | 681 | Novel antigens |
| LERVVEHNPRKVIDL | NBGA1 | 686 | Novel antigens |
| KVIDLLLSLYLDQNE | NBGA1 | 696 | Novel antigens |
| LLSLYLDQNEHADIR | NBGA1 | 701 | Novel antigens |
| HADIRVEALFLLMKA | NBGA1 | 711 | Novel antigens |
| VEALFLLMKADPSIH | NBGA1 | 716 | Novel antigens |
| LLMKADPSIHVLKMV | NBGA1 | 721 | Novel antigens |
| DPSIHVLKMVAELTH | NBGA1 | 726 | Novel antigens |
| VLKMVAELTHTESNN | NBGA1 | 731 | Novel antigens |
| QVLSASQSAIKSAAN | NBGA1 | 746 | Novel antigens |
| YSEMRRKAKAVEHLL | NBGA1 | 766 | Novel antigens |
| VEHLLSTRNMDVSYS | NBGA1 | 776 | Novel antigens |
| STRNMDVSYSKSYLY | NBGA1 | 781 | Novel antigens |
| DVSYSKSYLYGYKSK | NBGA1 | 786 | Novel antigens |
| KSYLYGYKSKKINYD | NBGA1 | 791 | Novel antigens |
| GYKSKKINYDSLYNL | NBGA1 | 796 | Novel antigens |
| KINYDSLYNLNNIGS | NBGA1 | 801 | Novel antigens |
| EDSIYPKSMLLNIFT | NBGA1 | 816 | Novel antigens |
| PKSMLLNIFTNNLGR | NBGA1 | 821 | Novel antigens |
| LNIFTNNLGRINTHV | NBGA1 | 826 | Novel antigens |
| QKGYMVSSMTDLWEA | NBGA1 | 841 | Novel antigens |
| DLWEAFHTIYKKDNG | NBGA1 | 851 | Novel antigens |
| KTLVKFVEGNLKYFN | NBGA1 | 871 | Novel antigens |
| LKYFNMGVQKFWAFD | NBGA1 | 881 | Novel antigens |
| MGVQKFWAFDNTTFS | NBGA1 | 886 | Novel antigens |
| FWAFDNTTFSNASAV | NBGA1 | 891 | Novel antigens |
| NTTFSNASAVIQEFL | NBGA1 | 896 | Novel antigens |
| NASAVIQEFLKTYKK | NBGA1 | 901 | Novel antigens |
| IQEFLKTYKKPTNFN | NBGA1 | 906 | Novel antigens |
| PTNFNHTKLSSSSSI | NBGA1 | 916 | Novel antigens |
| HTKLSSSSSITLTLP | NBGA1 | 921 | Novel antigens |
| SSSSITLTLPCAMGL | NBGA1 | 926 | Novel antigens |
| PAYFKMNSPSLWKYN | NBGA1 | 941 | Novel antigens |
| MNSPSLWKYNGEFSI | NBGA1 | 946 | Novel antigens |
| GEFSIQTDAKTDVPM | NBGA1 | 956 | Novel antigens |
| TDVPMSLENFMNITG | NBGA1 | 966 | Novel antigens |
| SLENFMNITGSINLM | NBGA1 | 971 | Novel antigens |
| MNITGSINLMFSQMY | NBGA1 | 976 | Novel antigens |
| SINLMFSQMYHAQLA | NBGA1 | 981 | Novel antigens |
| FSQMYHAQLAFSTAF | NBGA1 | 986 | Novel antigens |
| RKVEVHVPVKFQINL | NBGA1 | 1011 | Novel antigens |
| HVPVKFQINLDFKNH | NBGA1 | 1016 | Novel antigens |
| FQINLDFKNHNGFIR | NBGA1 | 1021 | Novel antigens |
| DFKNHNGFIRIIPLF | NBGA1 | 1026 | Novel antigens |
| NGFIRIIPLFTDRDY | NBGA1 | 1031 | Novel antigens |
| DVLQWQTIPYTTIHN | NBGA1 | 1046 | Novel antigens |
| QTIPYTTIHNVPDFE | NBGA1 | 1051 | Novel antigens |
| RLFHTQPSITYQTLK | NBGA1 | 1051 | Novel antigens |
| VPDFETVYMDQLFKL | NBGA1 | 1061 | Novel antigens |
| YQTLKQSTWINYFKL | NBGA1 | 1061 | Novel antigens |
| TVYMDQLFKLIHVRK | NBGA1 | 1066 | Novel antigens |
| QSTWINYFKLIHVRK | NBGA1 | 1066 | Novel antigens |
| QLFKLIHVRKTAHFE | NBGA1 | 1071 | Novel antigens |
| NYFKLIHVRKTAHFE | NBGA1 | 1071 | Novel antigens |
| IHVRKTAHFEKKMGE | NBGA1 | 1076 | Novel antigens |
| NTGIVFKVKYDTDQE | NBGA1 | 1091 | Novel antigens |
| FKVKYDTDQEFLDTK | NBGA1 | 1096 | Novel antigens |
| FLDTKWFLDEFKVLQ | NBGA1 | 1106 | Novel antigens |
| WFLDEFKVLQLFTGL | NBGA1 | 1111 | Novel antigens |
| FKVLQLFTGLNYDVP | NBGA1 | 1116 | Novel antigens |
| TKDIFYNNLTVYYDH | NBGA1 | 1131 | Novel antigens |
| YIMIMKTPKTIAVSF | NBGA1 | 1141 | Novel antigens |
| QSKFYETLNPVVQQN | NBGA1 | 1161 | Novel antigens |
| ETLNPVVQQNLKLSS | NBGA1 | 1166 | Novel antigens |
| VVQQNLKLSSGKKQK | NBGA1 | 1171 | Novel antigens |
| HRNVKSHRIRREYTE | NBGA1 | 1186 | Novel antigens |
| PRRQEYLSKSMALTG | NBGA1 | 1216 | Novel antigens |
| YLSKSMALTGDATAV | NBGA1 | 1221 | Novel antigens |
| DATAVVLDMTLKFEG | NBGA1 | 1231 | Novel antigens |
| PAESYFTTTVSHATS | NBGA1 | 1246 | Novel antigens |
| FTTTVSHATSLVNGS | NBGA1 | 1251 | Novel antigens |
| SHATSLVNGSSNYLL | NBGA1 | 1256 | Novel antigens |
| LVNGSSNYLLFYDQH | NBGA1 | 1261 | Novel antigens |
| SNYLLFYDQHYYEEK | NBGA1 | 1266 | Novel antigens |
| KRNQFCLSWSVYKPQ | NBGA1 | 1281 | Novel antigens |
| CLSWSVYKPQVPIMN | NBGA1 | 1286 | Novel antigens |
| VYKPQVPIMNIYSAF | NBGA1 | 1291 | Novel antigens |
| VPIMNIYSAFEFDPN | NBGA1 | 1296 | Novel antigens |
| IYSAFEFDPNSKVHA | NBGA1 | 1301 | Novel antigens |
| SKVHAIMNIGKECEN | NBGA1 | 1311 | Novel antigens |
| GGSAVANIDMLRLSE | NBGA1 | 1326 | Novel antigens |
| ANIDMLRLSEHLDYV | NBGA1 | 1331 | Novel antigens |
| LRLSEHLDYVKNLTV | NBGA1 | 1336 | Novel antigens |
| HLDYVKNLTVSKLCD | NBGA1 | 1341 | Novel antigens |
| ASDLNRVHVDINYNL | NBGA1 | 1376 | Novel antigens |
| RVHVDINYNLKQHET | NBGA1 | 1381 | Novel antigens |
| FKRRVYKVYDFVRTH | NBGA1 | 1396 | Novel antigens |
| YKVYDFVRTHLYPHV | NBGA1 | 1401 | Novel antigens |
| FVRTHLYPHVSEDVI | NBGA1 | 1406 | Novel antigens |
| SEDVIVDNPAQFISA | NBGA1 | 1416 | Novel antigens |
| VDNPAQFISANFTLK | NBGA1 | 1421 | Novel antigens |
| QFISANFTLKDNTRA | NBGA1 | 1426 | Novel antigens |
| NFTLKDNTRAFNVSI | NBGA1 | 1431 | Novel antigens |
| DNTRAFNVSIKTPVL | NBGA1 | 1436 | Novel antigens |
| FNVSIKTPVLSVNAT | NBGA1 | 1441 | Novel antigens |
| KTPVLSVNATVVRLQ | NBGA1 | 1446 | Novel antigens |
| ETPVLSVNATSVRLQ | NBGA1 | 1446 | Novel antigens |
| SVNATVVRLQSWQSE | NBGA1 | 1451 | Novel antigens |
| VVRLQSWQSEMLRMN | NBGA1 | 1456 | Novel antigens |
| SWQSEMLRMNPRTSF | NBGA1 | 1461 | Novel antigens |
| MLRMNPRTSFAKRFA | NBGA1 | 1466 | Novel antigens |
| AKRFAKWALPLYNKP | NBGA1 | 1476 | Novel antigens |
| SSYINTFDNFTYSAH | NBGA1 | 1496 | Novel antigens |
| TFDNFTYSAHHIVQN | NBGA1 | 1501 | Novel antigens |
| TYSAHHIVQNDAFYT | NBGA1 | 1506 | Novel antigens |
| HIVQNDAFYTILDIP | NBGA1 | 1511 | Novel antigens |
| DAFYTILDIPQKFNM | NBGA1 | 1516 | Novel antigens |
| QKFNMEYFKVAFKPT | NBGA1 | 1526 | Novel antigens |
| EYFKVAFKPTSPVPN | NBGA1 | 1531 | Novel antigens |
| MQREVLVFLRNAKIE | NBGA1 | 1546 | Novel antigens |
| LVFLRNAKIELKPNQ | NBGA1 | 1551 | Novel antigens |
| DLNVSQDRIGYVYAF | NBGA1 | 1586 | Novel antigens |
| QDRIGYVYALPTKAA | NBGA1 | 1591 | Novel antigens |
| YVYALPTKAAHIVFP | NBGA1 | 1596 | Novel antigens |
| HIVFPSYEIEMFYDG | NBGA1 | 1606 | Novel antigens |
| SYEIEMFYDGSRIMI | NBGA1 | 1611 | Novel antigens |
| MFYDGSRIMIQASNM | NBGA1 | 1616 | Novel antigens |
| SRIMIQASNMYRNFT | NBGA1 | 1621 | Novel antigens |
| QASNMYRNFTKGLLW | NBGA1 | 1626 | Novel antigens |
| LTPWGCYAKDMALFV | NBGA1 | 1651 | Novel antigens |
| CYAKDMALFVASYAD | NBGA1 | 1656 | Novel antigens |
| MALFVASYADNSNSE | NBGA1 | 1661 | Novel antigens |
| LVSHQMRLSQVIKLA | NBGA1 | 1696 | Novel antigens |
| GVLVFTKENFKKGVS | NBGA10 | 16 | Novel antigens |
| DNEFVLVEFYAPWCG | NBGA10 | 31 | Novel antigens |
| PTLKFFRSGSPIDYS | NBGA10 | 91 | Novel antigens |
| DEIVSWLLKKTGPVA | NBGA10 | 111 | Novel antigens |
| VDDAKSFIDASNVAI | NBGA10 | 131 | Novel antigens |
| SFIDASNVAIIGFFK | NBGA10 | 136 | Novel antigens |
| AAKNFLAAANAIDDY | NBGA10 | 156 | Novel antigens |
| PQIEVTFEIDANGIL | NBGA11 | 31 | Novel antigens |
| TFEIDANGILQVSAE | NBGA11 | 36 | Novel antigens |
| LESYAYSLKNQLADK | NBGA11 | 101 | Novel antigens |
| KKELEDIVQPIIAKL | NBGA11 | 156 | Novel antigens |
| DIVQPIIAKLYQGAG | NBGA11 | 161 | Novel antigens |
| LELGALLTAMAMVTA | NBGA12 | 16 | Novel antigens |
| LLTAMAMVTAKLATV | NBGA12 | 21 | Novel antigens |
| STDSTLVYKIQPVNN | NBGA12 | 71 | Novel antigens |
| LVYKIQPVNNAHGGG | NBGA12 | 76 | Novel antigens |
| ASYFKSNCPDAYSYA | NBGA12 | 151 | Novel antigens |
| SSLEVFFQQQRILLR | NBGA13 | 1 | Novel antigens |
| FFQQQRILLRLHRCF | NBGA13 | 6 | Novel antigens |
| RILLRLHRCFQVLGR | NBGA13 | 11 | Novel antigens |
| WGGDVAFVKHLTALE | NBGA13 | 26 | Novel antigens |
| AFVKHLTALENTDGH | NBGA13 | 31 | Novel antigens |
| NQLNEIRHAILAAGD | NBGA13 | 96 | Novel antigens |
| IRHAILAAGDLYSRR | NBGA13 | 101 | Novel antigens |
| DGTKDLLFKNSATGL | NBGA13 | 126 | Novel antigens |
| KDLLFKNSATGLLSV | NBGA13 | 129 | Novel antigens |
| KHCLQMASNTMPYQI | NBGA14 | 16 | Novel antigens |
| MPYQIASGFSTSQLA | NBGA14 | 26 | Novel antigens |
| ASGFSTSQLAMIQNA | NBGA14 | 31 | Novel antigens |
| TSQLAMIQNAIDEYH | NBGA14 | 36 | Novel antigens |
| ERDDYVTIHWENIQS | NBGA14 | 121 | Novel antigens |
| YGKIIKRLEAKGFKL | NBGA15 | 1 | Novel antigens |
| KGFKLVAMKFVWADE | NBGA15 | 11 | Novel antigens |
| VAMKFVWADEELLKK | NBGA15 | 16 | Novel antigens |
| FPGLVKYMSSGPVVP | NBGA15 | 41 | Novel antigens |
| MVWEGLNVVKTGRLM | NBGA15 | 56 | Novel antigens |
| LNVVKTGRLMLGATD | NBGA15 | 61 | Novel antigens |
| STRMELQHLQSIEVF | NBGA16 | 1 | Novel antigens |
| LQHLQSIEVFPEDEG | NBGA16 | 6 | Novel antigens |
| ILSCRIIGAQKFDVV | NBGA16 | 76 | Novel antigens |
| SKDFQYTNEANIYKL | NBGA16 | 101 | Novel antigens |
| YTNEANIYKLNIAEI | NBGA16 | 106 | Novel antigens |
| NIYKLNIAEIFPEDS | NBGA16 | 111 | Novel antigens |
| LILATAALAVAYPSP | NBGA2 | 5 | Novel antigens |
| ILATAALAVAYPSPG | NBGA2 | 6 | Novel antigens |
| QDYKVLADKTYLTRQ | NBGA2 | 21 | Novel antigens |
| LADKTYLTRQRDLLK | NBGA2 | 26 | Novel antigens |
| YLTRQRDLLKLLVRI | NBGA2 | 31 | Novel antigens |
| RDLLKLLVRIQQPNY | NBGA2 | 36 | Novel antigens |
| LLVRIQQPNYYADQY | NBGA2 | 41 | Novel antigens |
| YADQYEIGQSYDIEA | NBGA2 | 51 | Novel antigens |
| YDIEANINNYKYPYV | NBGA2 | 61 | Novel antigens |
| NINNYKYPYVVKNFV | NBGA2 | 66 | Novel antigens |
| KYPYVVKNFVAAYKN | NBGA2 | 71 | Novel antigens |
| VKNFVAAYKNGMLAR | NBGA2 | 76 | Novel antigens |
| PYYTTQSYETKLLFD | NBGA2 | 96 | Novel antigens |
| QSYETKLLFDLFYYA | NBGA2 | 101 | Novel antigens |
| KLLFDLFYYANDYDT | NBGA2 | 106 | Novel antigens |
| LFYYANDYDTFYKTA | NBGA2 | 111 | Novel antigens |
| HINEGQFLYALSSAL | NBGA2 | 131 | Novel antigens |
| QFLYALSSALFQRED | NBGA2 | 136 | Novel antigens |
| LNDYILPAPYEIYPW | NBGA2 | 151 | Novel antigens |
| EIYPWLFVDSDVIQR | NBGA2 | 161 | Novel antigens |
| LFVDSDVIQRAYETR | NBGA2 | 166 | Novel antigens |
| DVIQRAYETRMSDVH | NBGA2 | 171 | Novel antigens |
| MSDVHLTAPKTYIFP | NBGA2 | 181 | Novel antigens |
| LTAPKTYIFPVNYTV | NBGA2 | 186 | Novel antigens |
| TYIFPVNYTVHTPEQ | NBGA2 | 191 | Novel antigens |
| ELNYFYHDVGLNTYY | NBGA2 | 206 | Novel antigens |
| YHDVGLNTYYSYYYF | NBGA2 | 211 | Novel antigens |
| LNTYYSYYYFNYPTF | NBGA2 | 216 | Novel antigens |
| SYYYFNYPTFFNSTE | NBGA2 | 221 | Novel antigens |
| NYPTFFNSTEYGVQF | NBGA2 | 226 | Novel antigens |
| DRRGEMFYYTRQQLY | NBGA2 | 241 | Novel antigens |
| PRHGEQFYYFYQQIY | NBGA2 | 241 | Novel antigens |
| MFYYTRQQLYARYFL | NBGA2 | 246 | Novel antigens |
| QFYYFYQQIYARYML | NBGA2 | 246 | Novel antigens |
| RQQLYARYFLERLSN | NBGA2 | 251 | Novel antigens |
| YQQIYARYMLERYSN | NBGA2 | 251 | Novel antigens |
| ARYFLERLSNDLPDV | NBGA2 | 256 | Novel antigens |
| EPLHYDRPFQTEYNP | NBGA2 | 271 | Novel antigens |
| KPFTYNKAFKTPYNP | NBGA2 | 271 | Novel antigens |
| DRPFQTEYNPQLRYP | NBGA2 | 276 | Novel antigens |
| NKAFKTPYNPQLRYP | NBGA2 | 276 | Novel antigens |
| PVRPYEYSRRSLYYS | NBGA2 | 296 | Novel antigens |
| PARPAYMVPQDFDLY | NBGA2 | 296 | Novel antigens |
| EYSRRSLYYSNGYSH | NBGA2 | 301 | Novel antigens |
| SLYYSNGYSHYYGNY | NBGA2 | 306 | Novel antigens |
| NYYTGDYHPSYYYGY | NBGA2 | 331 | Novel antigens |
| DYHPSYYYGYATQYD | NBGA2 | 336 | Novel antigens |
| YYYGYATQYDYYYPE | NBGA2 | 341 | Novel antigens |
| ATQYDYYYPEDLQSY | NBGA2 | 346 | Novel antigens |
| YYYPEDLQSYERRVR | NBGA2 | 351 | Novel antigens |
| GYFFGFQGEKYPLYE | NBGA2 | 371 | Novel antigens |
| FQGEKYPLYENYIKG | NBGA2 | 376 | Novel antigens |
| YPLYENYIKGIDYLG | NBGA2 | 381 | Novel antigens |
| NQRFYGSIYHYYRQL | NBGA2 | 406 | Novel antigens |
| GSIYHYYRQLAGKSV | NBGA2 | 411 | Novel antigens |
| YYRQLAGKSVDPYNN | NBGA2 | 416 | Novel antigens |
| DPYNNYGLAPSALQN | NBGA2 | 426 | Novel antigens |
| YGLAPSALQNIYTTL | NBGA2 | 431 | Novel antigens |
| SALQNIYTTLRDPAN | NBGA2 | 436 | Novel antigens |
| RDPANWQILKRVNYL | NBGA2 | 446 | Novel antigens |
| WQILKRVNYLFQRYK | NBGA2 | 451 | Novel antigens |
| RVNYLFQRYKGYLPR | NBGA2 | 456 | Novel antigens |
| EHFDVDLDNVVNVKV | NBGA2 | 496 | Novel antigens |
| AEDGKYIDYRARQTR | NBGA2 | 511 | Novel antigens |
| YIDYRARQTRLNHKP | NBGA2 | 516 | Novel antigens |
| QATDAYVRVFLGPKY | NBGA2 | 541 | Novel antigens |
| YVRVFLGPKYDYLHS | NBGA2 | 546 | Novel antigens |
| DRRHYFVEIDRFPYK | NBGA2 | 566 | Novel antigens |
| FVEIDRFPYKVQAGK | NBGA2 | 571 | Novel antigens |
| RFPYKVQAGKTTITR | NBGA2 | 576 | Novel antigens |
| SVVSPDYQSYRTLMR | NBGA2 | 596 | Novel antigens |
| DYQSYRTLMRKVYDA | NBGA2 | 601 | Novel antigens |
| RTLMRKVYDAYEGKD | NBGA2 | 606 | Novel antigens |
| YEGKDQFYYDKSEQY | NBGA2 | 616 | Novel antigens |
| QFYYDKSEQYCGYPE | NBGA2 | 621 | Novel antigens |
| GQEYTFYVIVTPYAK | NBGA2 | 646 | Novel antigens |
| FYVIVTPYAKQDDHD | NBGA2 | 651 | Novel antigens |
| YKSFSYCGVGANHRI | NBGA2 | 671 | Novel antigens |
| SHDFVTPNMYFKDVV | NBGA2 | 701 | Novel antigens |
| TPNMYFKDVVIYHKK | NBGA2 | 706 | Novel antigens |
| FSNMDIKGKNALVTG | NBGA3 | 1 | Novel antigens |
| AATGIGLEYVKQLLE | NBGA3 | 16 | Novel antigens |
| GLEYVKQLLENGAQH | NBGA3 | 21 | Novel antigens |
| KQLLENGAQHVAVCD | NBGA3 | 26 | Novel antigens |
| KELVEKYGKGKAIFI | NBGA3 | 51 | Novel antigens |
| KAIFIKCDVTNIPEF | NBGA3 | 61 | Novel antigens |
| EDAFKKAYNAFKSLD | NBGA3 | 76 | Novel antigens |
| KAYNAFKSLDIVINN | NBGA3 | 81 | Novel antigens |
| FKSLDIVINNAGILN | NBGA3 | 86 | Novel antigens |
| IVINNAGILNDEKWE | NBGA3 | 91 | Novel antigens |
| DEKWELQIAINVNGV | NBGA3 | 101 | Novel antigens |
| LQIAINVNGVVRGTL | NBGA3 | 106 | Novel antigens |
| GGKGGVIVNIASILG | NBGA3 | 131 | Novel antigens |
| VIVNIASILGLQNMA | NBGA3 | 136 | Novel antigens |
| ASILGLQNMAGCPVY | NBGA3 | 141 | Novel antigens |
| GCPVYVGTKHAVVGI | NBGA3 | 151 | Novel antigens |
| AVVGISRSFGMPFHF | NBGA3 | 161 | Novel antigens |
| MPFHFDRTGVRVLTM | NBGA3 | 171 | Novel antigens |
| DRTGVRVLTMCPGVT | NBGA3 | 176 | Novel antigens |
| AKGMMHMIKKGANGS | NBGA3 | 226 | Novel antigens |
| GNKPVYEVAIPDRLT | NBGA3 | 246 | Novel antigens |
| VYEVAIPDRLTLRVE | NBGA3 | 250 | Novel antigens |
| AGVLWVCATGMARQV | NBGA4 | 11 | Novel antigens |
| QTLFLLLLLLAAVSA | NBGA4 | 31 | Novel antigens |
| LLLLLAAVSASQQCK | NBGA4 | 36 | Novel antigens |
| AGNTYVYSFEGGTTT | NBGA4 | 66 | Novel antigens |
| QGDGVKLHLKAKAEV | NBGA4 | 86 | Novel antigens |
| THLNDLESHPVSFSF | NBGA4 | 126 | Novel antigens |
| SEASLNLKRAILAHF | NBGA4 | 156 | Novel antigens |
| NLKRAILAHFQVAPQ | NBGA4 | 161 | Novel antigens |
| ILAHFQVAPQETARS | NBGA4 | 166 | Novel antigens |
| RGGTTTITKSRNLNK | NBGA4 | 201 | Novel antigens |
| CHLREHLRQDFASVT | NBGA4 | 216 | Novel antigens |
| HLRQDFASVTYHVES | NBGA4 | 221 | Novel antigens |
| FASVTYHVESDLQNS | NBGA4 | 226 | Novel antigens |
| TQEFKHQLQGGVLRV | NBGA4 | 246 | Novel antigens |
| KYLYRPFANQDAGAK | NBGA4 | 266 | Novel antigens |
| DAGAKTVVDSKLTYV | NBGA4 | 276 | Novel antigens |
| QSIIFHPPNVHPGSG | NBGA4 | 306 | Novel antigens |
| KEFANVVRVVRHTSK | NBGA4 | 346 | Novel antigens |
| VVRVVRHTSKNDLLS | NBGA4 | 351 | Novel antigens |
| NDLLSVYNQVKSGAG | NBGA4 | 361 | Novel antigens |
| FKDKSAGTKMFLDAL | NBGA4 | 376 | Novel antigens |
| AGTKMFLDALFRAGT | NBGA4 | 381 | Novel antigens |
| VAVELLKSNKITGPH | NBGA4 | 401 | Novel antigens |
| AEFYYLQLAYTRHVT | NBGA4 | 416 | Novel antigens |
| LQLAYTRHVTKAALL | NBGA4 | 421 | Novel antigens |
| TRHVTKAALLAAVTL | NBGA4 | 426 | Novel antigens |
| KAALLAAVTLLEQPN | NBGA4 | 431 | Novel antigens |
| AAVTLLEQPNPSKLA | NBGA4 | 436 | Novel antigens |
| AEVDEFLEKLSLLLN | NBGA4 | 471 | Novel antigens |
| FLEKLSLLLNGGCKV | NBGA4 | 476 | Novel antigens |
| SLLLNGGCKVSNYDE | NBGA4 | 481 | Novel antigens |
| SNYDEEVKIVATLKA | NBGA4 | 491 | Novel antigens |
| EVKIVATLKALQNAH | NBGA4 | 496 | Novel antigens |
| ATLKALQNAHHLNDA | NBGA4 | 501 | Novel antigens |
| HLNDAVTSKLQTCLL | NBGA4 | 511 | Novel antigens |
| DDGVPTRIRSAVLDV | NBGA4 | 526 | Novel antigens |
| CKAKDISLEVLKNYQ | NBGA4 | 546 | Novel antigens |
| ISLEVLKNYQLDSEL | NBGA4 | 551 | Novel antigens |
| LKNYQLDSELRIKAF | NBGA4 | 556 | Novel antigens |
| LDSELRIKAFLALVE | NBGA4 | 561 | Novel antigens |
| RIKAFLALVECPCNK | NBGA4 | 566 | Novel antigens |
| KELLDKEPSYQVGSF | NBGA4 | 586 | Novel antigens |
| KEPSYQVGSFIVSYL | NBGA4 | 591 | Novel antigens |
| QVGSFIVSYLRNLRA | NBGA4 | 596 | Novel antigens |
| IVSYLRNLRASANPS | NBGA4 | 601 | Novel antigens |
| RNLRASANPSKEKQK | NBGA4 | 606 | Novel antigens |
| AVFGEIRTTKRFPID | NBGA4 | 621 | Novel antigens |
| IRTTKRFPIDFRKFS | NBGA4 | 626 | Novel antigens |
| RFPIDFRKFSNNFEF | NBGA4 | 631 | Novel antigens |
| FRKFSNNFEFSYLLG | NBGA4 | 636 | Novel antigens |
| NNFEFSYLLGGANVG | NBGA4 | 641 | Novel antigens |
| TTVESNVIYSQNSFL | NBGA4 | 656 | Novel antigens |
| NVIYSQNSFLPRATT | NBGA4 | 661 | Novel antigens |
| LNLTTEFFGHSVNLL | NBGA4 | 676 | Novel antigens |
| EFFGHSVNLLEVELR | NBGA4 | 681 | Novel antigens |
| GYFNTHTAAEVVQKG | NBGA4 | 711 | Novel antigens |
| DVENTAKQRFNHAIR | NBGA4 | 731 | Novel antigens |
| AKQRFNHAIRGKRSV | NBGA4 | 736 | Novel antigens |
| NHAIRGKRSVTKEQL | NBGA4 | 741 | Novel antigens |
| TKEQLELVKSKSVSP | NBGA4 | 751 | Novel antigens |
| ELVKSKSVSPYHSET | NBGA4 | 756 | Novel antigens |
| DRELLLELSTRLFGA | NBGA4 | 771 | Novel antigens |
| RLFGAEVGWLALHHN | NBGA4 | 781 | Novel antigens |
| EVGWLALHHNARDAA | NBGA4 | 786 | Novel antigens |
| TTFNLLDKVMKKAKD | NBGA4 | 806 | Novel antigens |
| FDYKLRQHNTFLDTE | NBGA4 | 821 | Novel antigens |
| FLDTELVYPTSLGFP | NBGA4 | 831 | Novel antigens |
| LVYPTSLGFPLKLVL | NBGA4 | 836 | Novel antigens |
| SLGFPLKLVLAGSSA | NBGA4 | 841 | Novel antigens |
| LKLVLAGSSAVHVEL | NBGA4 | 846 | Novel antigens |
| VHDLVHNLKNSHVHF | NBGA4 | 866 | Novel antigens |
| HNLKNSHVHFRFVPS | NBGA4 | 871 | Novel antigens |
| SHVHFRFVPSAAVEF | NBGA4 | 876 | Novel antigens |
| RFVPSAAVEFVGAFV | NBGA4 | 881 | Novel antigens |
| AAVEFVGAFVVDAYA | NBGA4 | 886 | Novel antigens |
| VGAFVVDAYAVEAGL | NBGA4 | 891 | Novel antigens |
| VDAYAVEAGLKVAAT | NBGA4 | 896 | Novel antigens |
| VEAGLKVAATLHTAT | NBGA4 | 901 | Novel antigens |
| KVAATLHTATGSDIT | NBGA4 | 906 | Novel antigens |
| DVGVDVTVGLPVQKQ | NBGA4 | 926 | Novel antigens |
| PVQKQDIVTLKTEVL | NBGA4 | 936 | Novel antigens |
| DIVTLKTEVLTTVQE | NBGA4 | 941 | Novel antigens |
| HGCFDQLSPLVGLTF | NBGA4 | 976 | Novel antigens |
| VGLTFCTTMSFPWDP | NBGA4 | 986 | Novel antigens |
| FPWDPVASKAAFYPL | NBGA4 | 996 | Novel antigens |
| AFYPLNGPSKFSLVV | NBGA4 | 1006 | Novel antigens |
| TSYHFRASLNKADPH | NBGA4 | 1026 | Novel antigens |
| KKSLELLLETPGSKT | NBGA4 | 1041 | Novel antigens |
| ERKLGLILERTYDPY | NBGA4 | 1056 | Novel antigens |
| TYDPYHGVKAQLNSP | NBGA4 | 1066 | Novel antigens |
| HGVKAQLNSPWKQVS | NBGA4 | 1071 | Novel antigens |
| QLNSPWKQVSAELAF | NBGA4 | 1076 | Novel antigens |
| DEQEYYVKLGASVTG | NBGA4 | 1106 | Novel antigens |
| THQFNVAGSVTVDKT | NBGA4 | 1156 | Novel antigens |
| TDLKVYYGENHVVLK | NBGA4 | 1206 | Novel antigens |
| YYGENHVVLKSGFKR | NBGA4 | 1211 | Novel antigens |
| HVVLKSGFKRPSANN | NBGA4 | 1216 | Novel antigens |
| QYPDFGVNLIWNHKR | NBGA4 | 1241 | Novel antigens |
| GVNLIWNHKRDKNNF | NBGA4 | 1246 | Novel antigens |
| DKNNFGNSLAVVHGR | NBGA4 | 1256 | Novel antigens |
| EARFTLNQEAHYQFD | NBGA4 | 1276 | Novel antigens |
| LNQEAHYQFDSIHKF | NBGA4 | 1281 | Novel antigens |
| HYQFDSIHKFEFASK | NBGA4 | 1286 | Novel antigens |
| SIHKFEFASKNKVTY | NBGA4 | 1291 | Novel antigens |
| EFASKNKVTYPLLGI | NBGA4 | 1296 | Novel antigens |
| PLLGIIGKLDASVQP | NBGA4 | 1306 | Novel antigens |
| KTFHLDVEASYEKHK | NBGA4 | 1321 | Novel antigens |
| RVIVSEGKSKFTTEL | NBGA4 | 1371 | Novel antigens |
| NNIDFQIDAEAKIHG | NBGA4 | 1406 | Novel antigens |
| QPDPYKLDSGLVYNP | NBGA4 | 1421 | Novel antigens |
| KLDSGLVYNPQLFDA | NBGA4 | 1426 | Novel antigens |
| KVFLKNYLVGNAQFK | NBGA4 | 1471 | Novel antigens |
| NYLVGNAQFKYTNGE | NBGA4 | 1476 | Novel antigens |
| GSATLNVDVPKLGRK | NBGA4 | 1491 | Novel antigens |
| DLHVKGSQHVATVEL | NBGA4 | 1511 | Novel antigens |
| GSQHVATVELYYNAE | NBGA4 | 1516 | Novel antigens |
| ATVELYYNAEKKLAF | NBGA4 | 1521 | Novel antigens |
| YYNAEKKLAFHTDTD | NBGA4 | 1526 | Novel antigens |
| KKLAFHTDTDLKKDS | NBGA4 | 1531 | Novel antigens |
| LDSKNVLSILNYKTE | NBGA4 | 1546 | Novel antigens |
| VLSILNYKTEVNVKG | NBGA4 | 1551 | Novel antigens |
| YTGPFSVDNVLEFKL | NBGA5 | 16 | Novel antigens |
| KKLQFTYSESLDLDD | NBGA5 | 51 | Novel antigens |
| SSGKASYESFQNFRV | NBGA5 | 246 | Novel antigens |
| SYESFQNFRVEADIE | NBGA5 | 251 | Novel antigens |
| LKKWHVLLANKPQAK | NBGA5 | 271 | Novel antigens |
| LKADVFFNKFNPTDN | NBGA5 | 336 | Novel antigens |
| RQPLSFDHAVELKLL | NBGA5 | 436 | Novel antigens |
| TYNFHSYLNEKALGV | NBGA5 | 456 | Novel antigens |
| KALGVILTLPQRIIA | NBGA5 | 466 | Novel antigens |
| KAAVHLLVAVKASKE | NBGA5 | 511 | Novel antigens |
| DGASYISTLAYQDEK | NBGA5 | 616 | Novel antigens |
| AQIQVVIHLDEQYIY | NBGA5 | 636 | Novel antigens |
| EQYIYVKSPTAELIK | NBGA5 | 646 | Novel antigens |
| SKAVYYKKILPTRSS | NBGA5 | 696 | Novel antigens |
| YKKILPTRSSPLISC | NBGA5 | 701 | Novel antigens |
| IESIRKQTAIEIEQL | NBGA6 | 96 | Novel antigens |
| KQTAIEIEQLNARVV | NBGA6 | 101 | Novel antigens |
| KLQIQITELEMSLDV | NBGA6 | 131 | Novel antigens |
| TIKKQSLTLTEIQAH | NBGA6 | 156 | Novel antigens |
| GIAQRKLQSVTAELE | NBGA6 | 186 | Novel antigens |
| RVNELTTINVNLASA | NBGA6 | 226 | Novel antigens |
| TTINVNLASAKSKVE | NBGA6 | 231 | Novel antigens |
| EQERIVKIEAIKKSL | NBGA6 | 286 | Novel antigens |
| LSLIRAKHRTFVTTS | NBGA6 | 431 | Novel antigens |
| PQKFKVVFDTGSSNL | NBGA7 | 36 | Novel antigens |
| VVFDTGSSNLWVPSK | NBGA7 | 41 | Novel antigens |
| WVPSKKCHLTNIACL | NBGA7 | 51 | Novel antigens |
| KCHLTNIACLLHNKY | NBGA7 | 56 | Novel antigens |
| NIACLLHNKYDSTKS | NBGA7 | 61 | Novel antigens |
| NGTSFAIQYGSGSLS | NBGA7 | 81 | Novel antigens |
| SGSLSGFLSTDVLDI | NBGA7 | 91 | Novel antigens |
| GFLSTDVLDIGGLKV | NBGA7 | 96 | Novel antigens |
| DVLDIGGLKVQKQTF | NBGA7 | 101 | Novel antigens |
| EPGLAFVAAKFDGIL | NBGA7 | 121 | Novel antigens |
| FVAAKFDGILGMAYS | NBGA7 | 126 | Novel antigens |
| FDGILGMAYSTISVD | NBGA7 | 131 | Novel antigens |
| TISVDGVTPVFYNMV | NBGA7 | 141 | Novel antigens |
| GVTPVFYNMVKQGLV | NBGA7 | 146 | Novel antigens |
| FYNMVKQGLVSQPIF | NBGA7 | 151 | Novel antigens |
| KQGLVSQPIFSFYLS | NBGA7 | 156 | Novel antigens |
| SQPIFSFYLSRDPGA | NBGA7 | 161 | Novel antigens |
| SDPNHYKGDFTYLSV | NBGA7 | 186 | Novel antigens |
| YKGDFTYLSVDRKMY | NBGA7 | 191 | Novel antigens |
| TYLSVDRKMYWQFKM | NBGA7 | 196 | Novel antigens |
| DRKMYWQFKMDKIQI | NBGA7 | 201 | Novel antigens |
| WQFKMDKIQIGNGSF | NBGA7 | 206 | Novel antigens |
| IAGPVSEVTALNRQI | NBGA7 | 236 | Novel antigens |
| SEVTALNRQIGGTPI | NBGA7 | 241 | Novel antigens |
| ILGGKKFTLEGKDYI | NBGA7 | 276 | Novel antigens |
| KFTLEGKDYILRVSQ | NBGA7 | 281 | Novel antigens |
| GKDYILRVSQLGHTV | NBGA7 | 286 | Novel antigens |
| LGHTVCLSGFMGIDL | NBGA7 | 296 | Novel antigens |
| CLSGFMGIDLPKGPL | NBGA7 | 301 | Novel antigens |
| WILGDVFIGKFYTEF | NBGA7 | 316 | Novel antigens |
| VFIGKFYTEFDMENN | NBGA7 | 321 | Novel antigens |
| FYTEFDMENNRVGFA | NBGA7 | 326 | Novel antigens |
| AGEKVRIIIDRFMDF | NBGA8 | 16 | Novel antigens |
| RIIIDRFMDFREQEK | NBGA8 | 21 | Novel antigens |
| VPPELVVVFDVRLAV | NBGA8 | 66 | Novel antigens |
| VVVFDVRLAVTVDHA | NBGA8 | 71 | Novel antigens |
| HDEFLNEDIFLKGID | NBGA8 | 176 | Novel antigens |
| NEDIFLKGIDIFCQI | NBGA8 | 181 | Novel antigens |
| LKGIDIFCQIIPAVA | NBGA8 | 186 | Novel antigens |
| IFCQIIPAVANVAPP | NBGA8 | 191 | Novel antigens |
| TLGEAISSSTLRVFA | NBGA9 | 6 | Novel antigens |
| NIREGGFAHFEARLE | NBGA9 | 76 | Novel antigens |
| SSRITTFFNFGYVAL | NBGA9 | 111 | Novel antigens |
| TFFNFGYVALTIKHV | NBGA9 | 116 | Novel antigens |
| GYVALTIKHVTTHDI | NBGA9 | 121 | Novel antigens |

TABLE 6
Non-redundant Bla g Epitopes (SEQ ID NOs.: 1834-1997)

| | | | Average Magnitude | Response Rate |
|---|---|---|---|---|
| Sequence | Antigen | Position | of Response | per Subject |
| TIPYYTKKFDEVVKA | Bla g 5 | 126 | 311.6 | 11.4 |
| ISDFRAAIANYHYDA | Bla g 5 | 96 | 216.2 | 18.6 |
| YFVAILDYLNHMAKE | Bla g 5 | 156 | 137.2 | 15.7 |
| VAISRYLGKQFGLSG | Bla g 5 | 66 | 94.9 | 8.6 |
| MIVDTISDFRAAIAN | Bla g 5 | 91 | 91.4 | 7.1 |
| DLVANQPNLKALREK | Bla g 5 | 171 | 91.0 | 7.1 |
| HDDRLGFLTFCPTNL | Bla g 9 | 261 | 83.1 | 7.1 |
| KNRTTIRGRTKFEGN | Bla g 4 | 71 | 81.7 | 2.9 |
| DRKMYWQFKMDKIQI | NBGA7 | 201 | 78.8 | 5.7 |
| ALREKVLGLPAIKAW | Bla g 5 | 181 | 77.1 | 12.9 |
| IRGRTKFEGNKFTID | Bla g 4 | 76 | 75.5 | 5.7 |
| NDIEKRVPFSHDDRL | Bla g 9 | 251 | 72.8 | 15.7 |
| HMAKEDLVANQPNLK | Bla g 5 | 166 | 68.8 | 4.3 |
| VLEKLEAGFAKLAAS | Bla g 9 | 6 | 65.5 | 14.3 |
| NYAIVEGCPAAANGH | Bla g 4 | 111 | 64.6 | 1.4 |
| GIRIYVDVVLNQMSG | Bla g 11 | 108 | 62.5 | 4.3 |
| RWRQIFNMVGFRNAV | Bla g 11 | 388 | 61.7 | 11.4 |
| NIACLLHNKYDSTKS | NBGA7 | 61 | 61.0 | 2.9 |
| NGGYLAAGKLTWADF | Bla g 5 | 141 | 58.5 | 5.7 |
| LNIFTNNLGRINTHV | NBGA1 | 826 | 57.6 | 4.3 |
| KTPVLEIDGKQTHQS | Bla g 5 | 51 | 57.0 | 14.3 |
| PAYFKMNSPSLWKYN | NBGA1 | 941 | 56.1 | 4.3 |
| PKSMLLNIFTNNLGR | NBGA1 | 821 | 52.5 | 7.1 |
| FQINLDFKNHNGFIR | NBGA1 | 1021 | 52.0 | 1.4 |
| SSLFQVANQYTGILY | NBGA1 | 61 | 50.2 | 10.0 |
| VLGLPAIKAWVAKRP | Bla g 5 | 186 | 48.5 | 14.3 |
| QVYRRLVTAVNDIEK | Bla g 9 | 241 | 44.1 | 5.7 |
| RHNSAYKLHFNAFEY | NBGA1 | 226 | 44.0 | 1.4 |
| KLAASDSKSLLRKYL | Bla g 9 | 16 | 43.8 | 7.1 |
| RLFGAEVGWLALHHN | NBGA4 | 781 | 35.5 | 1.4 |
| RVPFSHDDRLGFLTF | Bla g 9 | 256 | 34.2 | 7.1 |
| WVCEHRWRQIFNMVG | Bla g 11 | 383 | 33.9 | 4.3 |
| ATDYENYAIVEGCPA | Bla g 4 | 106 | 32.7 | 1.4 |
| KFTIDYNDKGKAFSA | Bla g 4 | 86 | 32.0 | 11.4 |
| AAIANYHYDADENSK | Bla g 5 | 101 | 26.2 | 11.4 |
| FGSTLLDVIQSGLEN | Bla g 9 | 46 | 26.1 | 8.6 |
| HYQFDSIHKFEFASK | NBGA4 | 1286 | 24.4 | 1.4 |
| TKKFDEVVKANGGYL | Bla g 5 | 131 | 24.3 | 4.3 |
| YLGKQFGLSGKDDWE | Bla g 5 | 71 | 22.6 | 8.6 |
| LNQEAHYQFDSIHKF | NBGA4 | 1281 | 22.6 | 2.9 |
| KCHLTNIACLLHNKY | NBGA7 | 56 | 22.6 | 5.7 |
| GVTPVFYNMVKQGLV | NBGA7 | 146 | 20.8 | 1.4 |
| RCGRSMQGYPFNPCL | Bla g 9 | 126 | 20.4 | 10.0 |
| STSLVKAHSMRNSAS | NBGA1 | 326 | 19.9 | 4.3 |
| LKYFNMGVQKFWAFD | NBGA1 | 881 | 19.8 | 8.6 |
| GASILTYKTSKLYKM | Bla g 11 | 318 | 19.3 | 7.1 |
| NLEIDMIVDTISDFR | Bla g 5 | 86 | 19.1 | 2.9 |
| AKGMMHMIKKGANGS | NBGA3 | 226 | 18.7 | 2.9 |
| PAIKAWVAKRPPTDL | Bla g 5 | 190 | 18.7 | 10.0 |
| VPIMNIYSAFEFDPN | NBGA1 | 1296 | 18.5 | 4.3 |
| KAHSMRNSASMDLSS | NBGA1 | 331 | 16.4 | 4.3 |
| EAGFAKLAASDSKSL | Bla g 9 | 11 | 16.0 | 7.1 |
| DVLQWQTIPYTTIHN | NBGA1 | 1046 | 15.9 | 2.9 |
| KLYKMAVAFMLAYPY | Bla g 11 | 328 | 15.8 | 7.1 |
| AGTWSALNSIQQFIS | NBGA1 | 536 | 15.7 | 7.1 |
| VIYVQIRFSVRRFHP | Bla g 4 | 126 | 15.1 | 2.9 |
| RGNNAIKWLVNFGVG | Bla g 11 | 278 | 15.0 | 5.7 |
| KFEGNKFTIDYNDKG | Bla g 4 | 81 | 14.2 | 4.3 |
| PLKKETIPYYTKKFD | Bla g 5 | 121 | 14.2 | 5.7 |
| QKGYMVSSMTDLWEA | NBGA1 | 841 | 13.9 | 8.6 |
| SPYFVTNTEKMITEF | Hsp60 | 201 | 13.6 | 2.9 |
| RILLRLHRCFQVLGR | NBGA13 | 11 | 13.5 | 1.4 |
| RSEERLATATAKLAE | Bla g 7 | 101 | 13.3 | 1.4 |
| WCNEEDHLRIISMQM | Bla g 9 | 221 | 13.1 | 7.1 |
| RCNNVGIRIYVDVVL | Bla g 11 | 103 | 13.0 | 2.9 |
| LDYLNHMAKEDLVAN | Bla g 5 | 161 | 13.0 | 10.0 |
| AKRFAKWALPLYNKP | NBGA1 | 1476 | 12.2 | 1.4 |
| GEKDFEDYRFQEGDW | Bla g 5 | 26 | 12.0 | 8.6 |
| FYTEFDMENNRVGFA | NBGA7 | 326 | 11.3 | 2.9 |
| CPTNLGTTVRASVRI | Bla g 9 | 271 | 11.2 | 4.3 |
| FRPWWERYQLVSYNL | Bla g 11 | 16 | 10.8 | 4.3 |
| IVINNAGILNDEKWE | NBGA3 | 91 | 10.8 | 4.3 |
| DENSKQKKWDPLKKE | Bla g 5 | 111 | 10.3 | 5.7 |
| LIPVDQIIAIATDYL | Bla g 1.01 | 46 | 9.8 | 1.4 |
| GHSHFVSDVVLSSDG | RACK1 | 61 | 9.6 | 2.9 |
| IHENLIVTSPFRPWW | Bla g 11 | 6 | 9.3 | 2.9 |
| KAIFIKCDVTNIPEF | NBGA3 | 61 | 9.3 | 7.1 |
| MAPSYKLTYCPVKAL | Bla g 5 | 1 | 8.8 | 4.3 |
| LNAIEFINNIHDLLG | Bla g 1 | 376 | 8.8 | 2.9 |
| FLLSYGEKDFEDYRF | Bla g 5 | 21 | 8.5 | 8.6 |
| QDVHKKLREWLSKNV | TPI | 181 | 8.5 | 1.4 |
| HGRTFSSLFQVANQY | NBGA1 | 56 | 8.4 | 4.3 |
| WVPSKKCHLTNIACL | NBGA7 | 51 | 8.4 | 5.7 |
| KNMTYVNTSLVLAFS | NBGA1 | 591 | 8.4 | 2.9 |
| KDDWENLEIDMIVDT | Bla g 5 | 81 | 8.4 | 2.9 |
| QKKWDPLKKETIPYY | Bla g 5 | 116 | 7.7 | 4.3 |
| MNITGSINLMFSQMY | NBGA1 | 976 | 7.6 | 5.7 |
| PVDQIIAIATDYLAN | Bla g 1.01 | 240 | 7.5 | 2.9 |
| QIIAIATDYLANDAE | Bla g 1.01 | 51 | 7.5 | 2.9 |
| MGVQKFWAFDNTTFS | NBGA1 | 886 | 7.3 | 7.1 |
| IQGKFGLDATAVGDE | Enolase | 196 | 6.9 | 1.4 |
| QQFISSEMVEPKEAS | NBGA1 | 546 | 6.8 | 2.9 |
| IDDIIAILPVDDLYA | Bla g 1 | 36 | 6.6 | 2.9 |
| QPNLKALREKVLGLP | Bla g 5 | 176 | 6.5 | 5.7 |
| KVFLKNYLVGNAQFK | NBGA4 | 1471 | 6.4 | 1.4 |
| VVRLQSWQSEMLRMN | NBGA1 | 1456 | 6.4 | 2.9 |
| HTKLSSSSSITLTLP | NBGA1 | 921 | 6.2 | 5.7 |
| KIGEYKNMIAEGIID | Hsp60 | 481 | 6.2 | 1.4 |
| KALQNAESEVAALNR | Bla g 7 | 76 | 6.0 | 1.4 |
| IRFSVRRFHPKLGDK | Bla g 4 | 131 | 5.8 | 2.9 |
| KAIEEDLKHFNLKYE | Bla g 4 | 161 | 5.7 | 2.9 |
| THQFNVAGSVTVDKT | NBGA4 | 1156 | 5.6 | 2.9 |
| IRHAILAAGDLYSRR | NBGA13 | 101 | 5.5 | 1.4 |
| RDMVRRCNNVGIRIY | Bla g 11 | 98 | 5.2 | 5.7 |
| KLGDKEMIQHYTLDQ | Bla g 4 | 141 | 5.0 | 1.4 |
| NASAVIQEFLKTYKK | NBGA1 | 901 | 5.0 | 2.9 |
| VVFDTGSSNLWVPSK | NBGA7 | 41 | 4.7 | 4.3 |
| EVVKANGGYLAAGKL | Bla g 5 | 136 | 4.6 | 5.7 |
| AQIQVVIHLDEQYIY | NBGA5 | 636 | 4.6 | 5.7 |
| ALNSIQQFISSEMVE | NBGA1 | 541 | 4.4 | 4.3 |
| KAAVHLLVAVKASKE | NBGA5 | 511 | 4.4 | 1.4 |
| LVYPTSLGFPLKLVL | NBGA4 | 836 | 4.4 | 2.9 |
| DKKVYRVFESTVTGR | NBGA1 | 171 | 4.4 | 2.9 |
| QTHQSVAISRYLGKQ | Bla g 5 | 61 | 4.3 | 4.3 |
| TGILYKARLSLDRNE | NBGA1 | 71 | 4.3 | 2.9 |
| SINLMFSQMYHAQLA | NBGA1 | 981 | 4.3 | 1.4 |
| STSCNVVVASQECVG | Bla g 2 | 56 | 4.2 | 4.3 |
| KQLKVSQIMEAARKL | NBGA1 | 496 | 4.2 | 4.3 |
| PNLKPSMPFGKTPVL | Bla g 5 | 41 | 4.2 | 2.9 |
| NTTFSNASAVIQEFL | NBGA1 | 896 | 4.2 | 5.7 |
| RIKAFLALVECPCNK | NBGA4 | 566 | 4.2 | 1.4 |
| KKLQFTYSESLDLDD | NBGA5 | 51 | 4.2 | 2.9 |
| VEALFLLMKADPSIH | NBGA1 | 716 | 4.2 | 1.4 |
| SVNATVVRLQSWQSE | NBGA1 | 1451 | 4.1 | 2.9 |
| LNTYYSYYYFNYPTF | NBGA2 | 216 | 4.1 | 2.9 |
| VNQHKKAIEEDLKHF | Bla g 4 | 156 | 4.0 | 2.9 |
| VFIGKFYTEFDMENN | NBGA7 | 321 | 4.0 | 2.9 |
| LTVFDSTSCNVVVAS | Bla g 2 | 51 | 4.0 | 2.9 |
| LVFLRNAKIELKPNQ | NBGA1 | 1551 | 4.0 | 2.9 |
| DCGVAGFRVDAAKHM | Bla g 11 | 198 | 3.9 | 2.9 |
| SEVTALNRQIGGTPI | NBGA7 | 241 | 3.9 | 2.9 |
| NVIYSQNSFLPRATT | NBGA4 | 661 | 3.8 | 1.4 |
| EIDGKQTHQSVAISR | Bla g 5 | 56 | 3.8 | 4.3 |
| YHYDADENSKQKKWD | Bla g 5 | 106 | 3.7 | 2.9 |
| KVIDLLLSLYLDQNE | NBGA1 | 696 | 3.6 | 7.1 |
| DRRGEMFYYTRQQLY | NBGA2 | 241 | 3.5 | 1.4 |
| LWEINMIKAIISQLQ | NBGA1 | 151 | 3.5 | 2.9 |
| EMIQHYTLDQVNQHK | Bla g 4 | 146 | 3.5 | 2.9 |
| ARYFLERLSNDLPDV | NBGA2 | 256 | 3.5 | 2.9 |
| DVLDIGGLKVQKQTF | NBGA7 | 101 | 3.5 | 2.9 |
| KELVEKYGKGKAIFI | NBGA3 | 51 | 3.4 | 2.9 |
| ERYQLVSYNLNSRSG | Bla g 11 | 21 | 3.4 | 1.4 |
| FSQMYHAQLAFSTAF | NBGA1 | 986 | 3.4 | 2.9 |
| VYEVAIPDRLTLRVE | NBGA3 | 250 | 3.4 | 2.9 |
| DPSIHVLKMVAELTH | NBGA1 | 726 | 3.4 | 1.4 |
| GKDYILRVSQLGHTV | NBGA7 | 286 | 3.4 | 4.3 |
| IAGPVSEVTALNRQI | NBGA7 | 236 | 3.3 | 2.9 |
| SHVHFRFVPSAAVEF | NBGA4 | 876 | 3.3 | 1.4 |
| FRKFSNNFEFSYLLG | NBGA4 | 636 | 3.3 | 1.4 |
| GEPIRFLLSYGEKDF | Bla g 5 | 16 | 3.3 | 2.9 |
| VQKLQKEVDRLEDEL | Bla g 7 | 246 | 3.3 | 1.4 |
| KEFANVVRVVRHTSK | NBGA4 | 346 | 3.3 | 2.9 |
| GQEYTFYVIVTPYAK | NBGA2 | 646 | 3.2 | 2.9 |
| LGHTVCLSGFMGIDL | NBGA7 | 296 | 3.2 | 2.9 |
| CATDTLANEDCFRHE | Bla g 4 | 6 | 3.2 | 2.9 |
| AAVAYLQSDEFETIV | Bla g 1.01 | 260 | 3.2 | 1.4 |
| KTPVLSVNATVVRLQ | NBGA1 | 1446 | 3.2 | 1.4 |
| QTLFLLLLLLAAVSA | NBGA4 | 31 | 3.2 | 1.4 |
| LKNYQLDSELRIKAF | NBGA4 | 556 | 3.2 | 1.4 |
| LRLSEHLDYVKNLTV | NBGA1 | 1336 | 3.1 | 1.4 |
| HHQRLFMVQSLERVV | NBGA1 | 676 | 3.1 | 2.9 |
| LNDYILPAPYEIYPW | NBGA2 | 151 | 3.0 | 2.9 |
| NAIEFLNNIHDLLGI | Bla g 1 | 1 | 3.0 | 1.4 |
| AVLALCATDTLANED | Bla g 4 | 1 | 3.0 | 2.9 |

TABLE 7
Novel CR Proteins (SEQ ID NOs.: 1998-2030)

| Sequence | |
|---|---|
| ALLCCLLVSAASAITPGWLPINSQLDYHVHGRTFSSLFQVANQYTGILYKAR | NBGA1 |
| LSLDRNEDQLITGKVTEAQFAPVNTQFSSGWDESVPDEKLHWDVVPMSQQP | |
| FQIELNSRGEVRKLRVNKFVELWEINMIKAIISQLQVVVDEDKKVYRVFEST | |
| VTGRCEALYEVDHLYPTTYLNPWQWTQQHDTKLRIMKNHQFTNCRHNSA | |
| YKLHFNAFEYFHLKQHKPETFLSNSAVSRVIADGDNLKNFTFYSGETIHKIVL | |
| NPEIYNKQKGMLVSHINVTVERKGRELTVIDYELRNVGDLSYSTSLVKAHS | |
| MRNSASMDLSSSSMSSSSSSSSSSSSSSSSSSSSSSSEEHHSHNQKLSKKRQVP | |
| LPRPLFEANFDASSGLTTEQPVTFRPRRQLFQGQDMSEEETEQNPEIIPANLLP | |
| TYNLIHNTKQVDVDPVGVAVRLSKDIAADLQGEPRVGEDRHILPRFTILVRL | |
| LKQLKVSQIMEAARKLYKLENDHPNYMNWDTWRVYRDAVSQAGTWSAL | |
| NSIQQFISSEMVEPKEASHLITVLPAAVSDKNKAYLHFLFEMTKDPVFKNMT | |
| YVNTSLVLAFSEVIHQVEMHQVRDLKIKSVYIPYLVQEFDDAVKENNSIKIQ | |
| LYTHALGVTGNTHILHYLRPYIIQLKTITHHQRLFMVQSLERVVEHNPRKVI | |
| DLLLSLYLDQNEHADIRVEALFLLMKADPSIHVLKMVAELTHTESNNQVLS | |
| ASQSAIKSAANVEGDIYSEMRRKAKAVEHLLSTRNMDVSYSKSYLYGYKSK | |
| KINYDSLYNLNNIGSEDSIYPKSMLLNIFTNNLGRINTHVQKGYMVSSMTDL | |
| WEAFHTIYKKDNGSPTDPKTLVKFVEGNLKYFNMGVQKFWAFDNTTFSNA | |
| SAVIQEFLKTYKKPTNFNHTKLSSSSSITLTLPCAMGLPAYFKMNSPSLWKY | |
| NGEFSIQTDAKTDVPMSLENFMNITGSINLMFSQMYHAQLAFSTAFDNKEYI | |
| SGLDRKVEVHVPVKFQINLDFKNHNGFIRIIPLFTDRDYDVLQWQTIPYTTIH | |
| NVPDFETVYMDQLFKLIHVRKTAHFEKKMGENTGIVFKVKYDTDQEFLDTK | |
| WFLDEFKVLQLFTGLNYDVPTKDIFYNNLTVYYDHEDTKNHAVSFTVTKEQ | |
| SKFYETLNPVVQQNLKLSSGKKQKHRNVKSHRIRREYTEDENPAIPKDKQP | |
| NSHPRRQEYLSKSMALTGDATAVVLDMTLKFEGPAESYFTTTVSHATSLVN | |
| GSSNYLLFYDQHYYEEKKRNQFCLSWSVYKPQVPIMNIYSAFEFDPNSKVH | |
| AIMNIGKECENGGSAVANIDMLRLSEHLDYVKNLTVSKLCDHEMRTKRDH | |
| VLPACRNSTERASDLNRVHVDINYNLKQHETFKRRVYKVYDFVRTHLYPH | |
| VSEDVIVDNPAQFISANFTLKDNTRAFNVSIKTPVLSVNATVVRLQSWQSEM | |
| LRMNPRTSFAKRFAKWALPLYNKPTCVVDSSYINTFDNFTYSAHHIVQNDA | |
| FYTILDIPQKFNMEYFKVAFKPTSPVPNMQREVLVFLRNAKIELKPNQGMPE | |
| VYVEGKRVDYNHHHSTDLNVSQDRIGYVYAFXXXXSSRKP | |
| YHCLSSGINAEYAGSSSTPCSNMTWNALLCCLLVSAASAITPGWLPINSQLD | NBGA1 |
| YHVHGRTFSSLFQVANQYTGILYKARLSLDRNEDQLITGKVTEAQFSPVNTQ | |
| FSSGWDESVPDEKLHWDVVPMSQQPFQIELNSRGEVRKLRVNKFVELWEIN | |
| MIKAIISQLQVVVDEDKKVYRVFESTVTGRCEALYEVDHLYPTTYLNPWQW | |
| TQQHDTKLRIMKNHQFTNCRHNSAYKLHFNAFEYFHLKQHKPETFLSNSAV | |
| SRVIADGDNLKNFTFYSGETIHKIVLNPEIYNKQKGMLVSHINVTVERKGRE | |
| LTVIDYELRNVGDLSYSTSLVKAHSMRNSASMDLSSSSMSSSSSSSSSSSSSSS | |
| SSSSSSEEHHSHNQKLSKKRQVPLPRPLFEANFDASSGLTTEQPVTFRPRRQL | |
| FQGQDMSEEETEQNPEIIPANLLPTYNLIHNTKQVDVDPVGVAVRLSKDIAA | |
| DLQGEPRVGEDRHILPRFTILVRLLKQLKVSQIMEAARKLYKLENDHPNYM | |
| NWDTWRVYRDAVSQAGTWSALNSIQQFISSEMVEPKEASHLITVLPAAVSD | |
| KNKAYLHFLFEMTKDPVFKNMTYVNTSLVLAFSEVIHQVEMHQVRDLKIKS | |
| VYIPYLVQEFDDAVKENNSIKIQLYTHALGVTGNTHILHYLRPYIIQLKTITH | |
| HQRLFMVQSLERVVEHNPRKVIDLLLSLYLDQNEHADIRVEALFLLMKADP | |
| SIHVLKMVAELTHTESNNQVLSASQSAIKSAANVEGDIYSEMRRKAKAVEH | |
| LLSTRNMDVSYSKSYLYGYKSKKINYDSLYNLNYIGSEDSIYPKSMLLNIFT | |
| NNLGRINTHVQKGYMVSSMTDLWEAFHTIYKKDNGSPTDPKTLVKFVEGN | |
| LKYFNMGVQKFWAFDNTTFSNASAVIQEFLKTYKKPTNFNHTKLSSSSSITL | |
| TLPCAMGLPAYFKMNSPSLWKYNGEFSIQTDAKTDVPMSLENFMNITGSINL | |
| MFSQMYHAQLAFSTAFDNKEYISGLDRKVEVHVPVKFQINLDFKNHNGFIRI | |
| IPLFTDRDYDVLQWQTIPYTTIHNVPDFETVYMDQLFKLIHVRKTAHFEKKM | |
| GENTGIVFKVKYDTDQEFLDTKWFLDEFKVLQLFTGLNYDVPTKDIFYNNL | |
| TVYYDHEDTKNHAVSFTVTKEQSKFYETLNPVVQQNLKLSSGKKQKHRNV | |
| KSHRIRREYTEDENPAIPKDKQPNSHPRRQEYLSKXMALTGDATAVVLDMT | |
| LKFEGPAESYFT | |
| TAHFEKKMGENTGIVFKVKYDTDQEFLDTKWFLDEFKVLQLFTGLNYDVPT | NBGA1 |
| KDIFYNNLTVYYDHEDTKNHAVSFTVTKEQSKFYETLNPVVQQNLKLSSGK | |
| KQKHRNVKSHRIRREYTEDENPAIPKDKQPNSHPRRQEYLSKSMALTGDAT | |
| AVVLDMTLKFEGPAESYFTTTVSHATSLVNGSSNYLLFYDQHYYEEKKRNQ | |
| FCLSWSVYKPQVPIMNIYSAFEFDPNSKVHAIMNIGKECENGGSAVANIDML | |
| RLSEHLDYVKNLTVSKLCDHEMRTKRDHVLPACRNSTERASDLNRVHVDIN | |
| YNLKQHETFKRRVYKVYDFVRTHLYPHVSEDVIVDNPAQFISANFTLKDNT | |
| RAFNVSIETPVLSVNATSVRLQSWQSEMLRMNPRTSFAKRFAKWALPLYYK | |
| PTCVVDSSYINTFDNFTYSAHHIVQNDAFYTILDIPQKFNMEYFKVAFKPTSP | |
| VPNMQREVLVFLRNAKIELKPNQGMPEVYVEGKRVDYNHHHSTDLNVSQD | |
| RIGYVYALPTKAAHIVFPSYEIEMFYDGSRIMIQASNMYRNFTKGLCGNMD | |
| GEFVNDVLTPWGCYAKDMALFVASYADNSNSEVRKIKATQNEQTCVPQFH | |
| QPLVSHQMRLSQVIKLADTSSSSESSSSSESHENNSSPSSESQVNKSKRQPNS | |
| RPRSSSSSSSSSSSESNESVLAKKIINNQIGPKPTLIPSQSPMTSDDKCMTQQPR | |
| HTYYENQFCVSEKPLDTCMPLICHATESYTIDVNFYCVPLGPAANHYMKLV | |
| KKGILPDLSRNRNGKRVVLPVEIPIQCEPVLN | |
| ESNNQVLSASQSAIKSAANVEGDIYSEMRRKAKAVEHLLSTRNMDVSYSKS | NBGA1 |
| YLYGYKSKKINYDSLYNLNYIGSEDSIYPKSMLLNIFTNNLGRINTHVQKGY | |
| MVSSMTDLWEAFHTIYKKDNGSPTDPKTLVKFVEGNLKYFNMGVQKFWAF | |
| DNTTFSNASAVIQEFLKTYKKPTNFNHTKLSSSSSITLTLPCAMGLPAYFKMN | |
| SPSLWKYNGEFSIQTDAKTDVPMSLENFMNITGSINLMFSQMYHAQLAFSTA | |
| FDNKEYISGLDRKVEVHVPVKFQINLDFKNHNGFIRIIPLFTDRDYDVLQWQ | |
| TIPYTTIHNVPDFETVYMDQLFKLIHVRKTAHFEKKMGENTGIVFKVKYDTD | |
| QEFLDTKWFLDEFKVLQLFTGLNYDVPTKDIFYNNLTVYYDHEDTKNHAVS | |
| FTVTKEQSKFYETLNPVVQQNLKLSSGKKQKHRNVKSHRIRREYTEDENPAI | |
| PKDKQPNSHPRRQEYLSKSMALTGDATAVVLDMTLKFEGPAESYFTTTVSH | |
| ATSLVNGSSNYLLFYDQHYYEEKKRNQFCLSWSVYKPQVPIMNIYSAFEFDP | |
| NSKVHAIMNIGKECENGGSAVANIDMLRLSEHLDYVKNLTVSKLCDHEMR | |
| TKRDHVLPACRNSTERASDLNRVHVDINYNLKQHETFKRRVYKVYDFVRT | |
| HLYPHVSEDVIVDNPAQFISANFTLKDNTRAFNVSIKTTCT | |
| YKLENDHPNYMNWDTWRVYRDAVSQAGTWSALNSIQQFISSEMVEPKEAS | NBGA1 |
| HLITVLPAAVSDKNKAYLHFLFEMTKDPVFKNMTYVNTSLVLAFSEVIHQV | |
| EMHQVRDLKIKSVYIPYLVQEFDDAVKENNSIKIQLYTHALGVTGNTHILHY | |
| LRPYIIQLKTITHHQRLFMVQSLERVVEHNPRKVIDLLLSLYLDQNEHADIRV | |
| EALFLLMKADPSIHVLKMVAELTHTESNNQVLSASQSAIKSAANVEGDIYSE | |
| MRRKAKAVEHLLSTRNMDVSYSKSYLYGYKSKKINYDSLYNLNYIGSEDSI | |
| YPKSMLLNIFTNNLGRINTHVQKGYMVSSMTDLWEAFHTIYKKDNGSPTDP | |
| KTLVKFVEGNLKYFNIGCPEILGI | |
| EQKINYDSLYNLNYIGSEDSIYPKSMLLNIFTNNLGRINTHVQKGYMVSSMT | NBGA1 |
| DLWEAFHTIYKKDNGSPTDPKTLVKFVEGNLKYFNMGVQKFWAFDNTTFS | |
| NASAVIQEFLKTYKKPTNFNHTKLSSSSSITLTLPCAMGLPAYFKMNSPSLW | |
| KYNGEFSIQTDAKTDVPMSLENFMNITGSINLMFSQMYHAQLAFSTAFDNK | |
| EYISGLDRKVEVHVPVKFQINLDFKNHNGFIRIIPLFTDRDYDVLQWQTIPYT | |
| TIHNVPDFETVYMDQLFKLIHVRKTAHFEKKMGENTGIVFKVKYDTDQEFL | |
| DTKWFLDEFKVLQLFTGLNYDVPTKDIFYNNLTVYYDHEDTKNHSRIFYCD | |
| KRTI | |
| MTWNALLCCLLVSAASAITPGWLPINSQLDYHVHGRTFSSLFQVANQYTGIL | NBGA1 |
| YKARLSLDRNEDQLITGKVTEAQFSPVNTQFSSGWDESVPDEKLHWDVVP | |
| MSQQPFQIELNSRGEVRKLRVNKFVELWEINMIKAIISQLQVVVDEDKKVYR | |
| VFESTVTGRCEALYEVDHLYPTTYLNPWQWTQQHDTKLRIMKNHQFTNCR | |
| HNSAYKLHFNAFEYFHLKQHKPETFLSNSAVSRVIADGDNLKNFTFYSGETI | |
| HKIVLNPEIYNKQKGMLVSHINVTVERKGRELTVIDYELRNVGDLSYSTSLV | |
| KDTFDEK | |
| NLQKPTNFNHTKLSSSSSITLTLPCAMGLPAYFKMNSPSLWKYNGEFSIQTD | NBGA1 |
| AKTDVPMSLENFMNITGSINLMFSQMYHAQLAFSTAFDNKEYISGLDRKVE | |
| VHVPVKFQINLDFKNHNGFIRIIPLFTDRDYDVLQWQTIPYTTIHNVPDFETV | |
| YMDQLFKLIHVRKTAHFEKKMGENTGIVFKVKYDTDQEFLDTKWFLDEFK | |
| VLQLFTGLNYDVPTKDIFYNNLTVYYDHEDTKNHAVSFTVTKEQSKFYETL | |
| NPVVQQNLKLSSGKKQKHRNVKSH | |
| LYIMIMKTPKTIAVSFTVTKEQSKFYETLNPVVQQNLKLSSGKKQKHRNVKS | NBGA1 |
| HRIRREYTEDENPAIPKDKQPNSHPRRQEYLSKSMALTGDATAVVLDMTLK | |
| FEGPAESYFTTTVSHATSLVNGSSNYLLFYDQHYYEEKKRNQFCLSWSVYK | |
| PQVPIMNIYSAFEFDPNSKVHAIMNIGKECENGGSAVANIDMLRLSEHLDYV | |
| KNLTVSKLCDHEMRTKRDHVLPACRNSTERASDLNRVHVDINYNLKQHET | |
| FKR | |
| QHETFKRRVYKVYDFVRTHLYPHVSEDVIVDNPAQFISANFTLKDNTRAFN | NBGA1 |
| VSIKTPVLSVNATVVRLQSWQSEMLRMNPRTSFAKRFAKWALPLYNKPTCV | |
| VDSSYINTFDNFTYSAHHIVQNDAFYTILDIPQKFNMEYFKVAFKPTSPVPN | |
| MQREVLVFLRNAKXELKPNQGMPEVYVEGKRVDYNHHHSTDLNVSQDRIG | |
| YVYALPTKAAHIVFPSYEIEMFYDGSRIMIQASNMYRNFTKGLCGKISVHI | |
| TSLGSINLMFSQMYHAQLAFSTAFDNKEYISGLDRKVEVHVPVKFQINLDFK | NBGA1 |
| NHNGFIRIIPLFTDRDYDVCNGRLFHTQPSITYQTLKQSTWINYFKLIHVRKT | |
| AHFEKKMGENTGIVFKVKYDTDQEFLDTKWFLDEFKVLQLFTGLNYDVPT | |
| KDIFYNNLTVYYDHEDTKNHAVSFTVTKEQSKFYETLNPVVQQNLKLSSGK | |
| KQKHRNVKSHRIRREYTE | |
| SSSTPCSNMTWNALLCCLLVSAASAITPGWLPINSQLDYHVHGRTFSSLFQV | NBGA1 |
| ANQYTGILYKARLSLDRNEDQLITGKVTEAQFSPVNTQFSSGWDESVPDEKL | |
| HWDVVPMSQQPFQIELNSRGEVRKLRVNKFVELWEINMIKAIISQLQVVVD | |
| EDKKVYRVFESTVTGRCEALYEVDHLYPTTYLNPWQWTQQHDTKL | |
| YHVHGRTFSSLFQVANQYTGILYKARLSLDRNEDQLITGKVTEAQFSPVNTQ | NBGA1 |
| FSSGWDESVPDEKLHWDVVPMSQQPFQIELNSRGEVRKLRVNKFVELWEIN | |
| MIKAIISQLQVVVDEDKKVYRVFESTVTGRCEALYEVDHLYPNNIY | |
| WQWTQQHDTKLRIMKNHQFTNCRHNSAYKLHFNAFEYFHLKQHKPETFLS | NBGA1 |
| NSAVSRVIADGDNLKNFTFYSGETIHKIVLNPEIYNKQKGMLVSHINVTVER | |
| KGRELTVIDYELRNVGRSLLLN | |
| RHNSAYKLHFNAFEYFHLKQHKPETFLSNSAVSRVIADGDNLKNFTFYSGET | NBGA1 |
| IHKIVLNPEIYNKQKGMLVSHINVTVERKGRELTVIDYELRNVGDLSYSTSL | |
| VKAHSMRNSASIGS | |
| FNMEYFKVAFKPTSPVPNMQREVLVFLRNAKIELKPNQGMPEVYVEGKRV | NBGA1 |
| DYNHHHSTDLNVSQDRIGYVYALPTKAAHIVFPSYEIEMFYDGSRIMIQASN | |
| MYRNFTKGLLW | |
| TALXLILATAALAVAYPSPGQDYKVLADKTYLTRQRDLLKLLVRIQQPNYY | NBGA2 |
| ADQYEIGQSYDIEANINNYKYPYVVKNFVAAYKNGMLARGVPYSPYYTTQ | |
| SYETKLLFDLFYYANDYDTFYKTACWARDHINEGQFLYALSSALFQREDLN | |
| DYILPAPYEIYPWLFVDSDVIQRAYETRMSDVHLTAPKTYIFPVNYTVHTPE | |
| QELNYFYHDVGLNTYYSYYYFNYPTFFNSTEYGVQFDRRGEMFYYTRQQL | |
| YARYFLERLSNDLPDVEPLHYDRPFQTEYNPQLRYPNGEDMPVRPYEYSRR | |
| SLYYSNGYSHYYGNYYGGNNEYYTGNYYTGDYHPSYYYGYATQYDYYYP | |
| EDLQSYERRVRDAIDYGYFFGFQGEKYPLYENYIKGIDYLGDVIEGNGDMV | |
| NQRFYGSIYHYYRQLAGKSVDPYNNYGLAPSALQNIYTTLRDPANWQILKR | |
| VNYLFQRYKGYLPRYTYDELSFPGIRIDNVDVGKLVTYFEHFDVDLDNVVN | |
| VKVAEDGKYIDYRARQTRLNHKPFTYNIEVHSEQATDAYVRVFLGPKYDYL | |
| HSEYDLNDRRHYFVEIDRFPYKVQAGKTTITRNSRDSSVVSPDYQSYRTLMR | |
| KVYDAYEGKDQFYYDKSEQYCGYPERLLLPKGKLGGQEYTFYVIVTPYAK | |
| QDDHDFEPYNYKSFSYCGVGANHRIPDDKPLGYPFDRPVYSHDFVTPNMYF | |
| KDVVIYHKKYEEINAATTHQ | |
| YYGGNNNYYNGNYYTGDYKPTYYYGYANQYDYYYPEDLQTYERRVRDAIDYG | NBGA2 |
| YFFGFPGGKYPLYDDYIKGIDYLGDAIEGNGDTVNKRLYGSIYHYYRQLAGKN | |
| VDPYNDIGLAPSALQNIYTTLRDPANWQILKRVNYLFQRYKGYLPRYTYDELS | |
| FPGVRVDNVDVGKLVTYFDYFDIDLDNVVNVKVAEDGKYVDYRARXTRLN | |
| HKPFTYNVEVYSEQATDVYVRVFLGPKYDYLHREYDLNDRRHYFVEIDRFP | |
| YKVQSGKTTITRNSRDSSVVSPDYQSYRTLMRKVYDAYEGKDKFYYDRSE | |
| NYCGYPERLLLPKGKLGGQEYTFYVIVTPYVKQDDHDFEPYNYKSFSYCGV | |
| GANHRIPDDKPLGYPFDRPVYR | |
| YEYDVPRHGEQFYYFYQQIYARYMLERYSNDMPDIKPFTYNKAFKTPYNPQ | NBGA2 |
| LRYPNGQEVPARPAYMVPQDFDLYMCLTSXNY | |
| FSNMDIKGKNALVTGAATGIGLEYVKQLLENGAQHVAVCDLDVRKGENAV | NBGA3 |
| KELVEKYGKGKAIFIKCDVTNIPEFEDAFKKAYNAFKSLDIVINNAGILNDEK | |
| WELQIAINVNGVVRGTLLGLEYMGKDKGGKGGVIVNIASILGLQNMAGCPV | |
| YVGTKHAVVGISRSFGMPFHFDRTGVRVLTMCPGVTDTPLISEAHHRQPGE | |
| WGEECGRELDSLPKQPPENVAKGMMHMIKKGANGSVWVCEGNKPVYEVA | |
| IPDRLTLRVE | |
| CLSSGINAEYAGVLWVCATGMARQVTSKGQQTLFLLLLLLAAVSASQQCKP | NBGA4 |
| KCEGKSSAFQTHYEAGNTYVYSFEGGTTTSLPGQQGDGVKLHLKAKAEVSF | |
| GDACEAVLKLKDVQVTGPDAQKFTHLNDLESHPVSFSFENGVVGGHICANG | |
| HDSEASLNLKRAILAHFQVAPQETARSGKSVVLDVFGLCPTDYSYTERGGTT | |
| TITKSRNLNKCHLREHLRQDFASVTYHVESDLQNSPLMESTQEFKHQLQGG | |
| VLRVSESHEKYLYRPFANQDAGAKTVVDSKLTYVGHNKKTAPAVSGAEQQ | |
| SIIFHPPNVHPGSGSAASVVDALHKAHQAMPEYVGENAAKEFANVVRVVRH | |
| TSKNDLLSVYNQVKSGAGFKDKSAGTKMFLDALFRAGTGDAVEVAVELLK | |
| SNKITGPHAEFYYLQLAYTRHVTKAALLAAVTLLEQPNPSKLAYLGVGALA | |
| GRYCSEHRCDGVAEVDEFLEKLSLLLNGGCKVSNYDEEVKIVATLKALQNA | |
| HHLNDAVTSKLQTCLLDDGVPTRIRSAVLDVFQSDACKAKDISLEVLKNYQ | |
| LDSELRIKAFLALVECPCNKKANDLKELLDKEPSYQVGSFIVSYLRNLRASA | |
| NPSKEKQKAVFGEIRTTKRFPIDFRKFSNNFEFSYLLGGANVGTTVESNVIYS | |
| QNSFLPRATTLNLTTEFFGHSVNLLEVELRQENLDLLAEGLFGPKGYFNTHT | |
| AAEVVQKGKEHWTDVENTAKQRFNHAIRGKRSVTKEQLELVKSKSVSPYH | |
| SETDRELLLELSTRLFGAEVGWLALHHNARDAAKNAFDTTFNLLDKVMKK | |
| AKDFDYKLRQHNTFLDTELVYPTSLGFPLKLVLAGSSAVHVELEGKVDVHD | |
| LVHNLKNSHVHFRFVPSAAVEFVGAFVVDAYAVEAGLKVAATLHTATGSD | |
| ITVKATEDVGVDVTVGLPVQKQDIVTLKTEVLTTVQEKGKPEVNTEISLPGT | |
| PRRDYHGCFDQLSPLVGLTFCTTMSFPWDPVASKAAFYPLNGPSKFSLVVE | |
| NEDVTSYHFRASLNKADPHKKSLELLLETPGSKTERKLGLILERTYDPYHGV | |
| KAQLNSPWKQVSAELAFTDNDKELSLLAKVTNDEQEYYVKLGASVTGDPN | |
| HATYHPLLEYKTPERKSSLVSKKGAKGAPEKLTHQFNVAGSVTVDKTANSK | |
| KYTFNDVVFTTPQGQYKVDGTVTSEGPTAFSTDLKVYYGENHVVLKSGFK | |
| RPSANNFNVHANVQPSQYPDFGVNLIWNHKRDKNNFGNSLAVVHGRDPNS | |
| EEARFTLNQEAHYQFDSIHKFEFASKNKVTYPLLGIIGKLDASVQPKTFHLD | |
| VEASYEKHKFEAELNANHGQQHTGDYDVKFHAKVLDNSLEFETKRVIVSE | |
| GKSKFTTELQVHPGGKYEAVADVTHVFERNNIDFQIDAEAKIHGQPDPYKL | |
| DSGLVYNPQLFDAHHKINVGAENYVDVSVNFKRGSGGNPSGNAKVFLKNY | |
| LVGNAQFKYTNGEGSATLNVDVPKLGRKLKGTGDLHVKGSQHVATVELY | |
| YNAEKKLAFHTDTDLKKDSLDSKNVLSILNYKTEVNVKGTLQGKLEDGQL | |
| KGEFGCNSA | |
| PKGKVSRTLKFHDHHYTGPFSVDNVLEFKLPSDKVKHIKMESHLQGELAEK | NBGA5 |
| KLQFTYSESLDLDDKTYKLSLESNNELEKGSNKLILVLPNKEPATYVNSWYF | |
| NYDDYRSKDVLKGGLTLTRNENAKFSIDVSGKKDYSDLDVHAKLDTPYEK | |
| LKHAELSLKNKYVPAPRLEVDTDFSLTVDDKKLAVVNKLTPGPFAGFPNIDF | |
| TATHPEGKTRVYVHLTSHKKNEVSGKAELEWPTNGGGKLTSSGKASYESFQ | |
| NFRVEADIESAKLNLKKWHVLLANKPQAKGSSSKTLQIQATEAGQPVINGR | |
| LEFHVEDKENTYKAGVSGNVQVRSQSQPLKADVFFNKFNPTDNGELGAEV | |
| GITIHLGDKSFDALSKHTNKESRASVSVCYQAGQCSVAEAHSVVKVLDFNH | |
| LEHDFGAKFDFKACGVNEGFVLTGKNVRQPLSFDHAVELKLLNEKHTTYNF | |
| HSYLNEKALGVILTLPQRIIALEGKLGYDKEKGERKVDLGFWLDKKKQPDN | |
| KAAVHLLVAVKASKEGTTFHGDAKFSHPALNKEFSVTGKGIALQDDTLLDA | |
| SVDLDIFAKKNQKITLVAKLERIPISHGYNVTGHLSAKGKLIDVSLDGGAALS | |
| ADGASYISTLAYQDEKHKSKSAQIQVVIHLDEQYIYVKSPTAELIKIERHESN | |
| NGKNAKGEVFVLGLEPVEFDETEDFPVSSKAVYYKKILPTRSSPLISCTIC | |
| AGQTREHKEALTRENKKLGDDLHDARNQLADLNRRFHELEIELRRLENERE | NBGA6 |
| ELTAAYKEAEAGRKAEEQRAQRLSAELGNFRHEAERRLAEKDEEIESIRKQT | |
| AIEIEQLNARVVEAETKLKTEVTRIKKKLQIQITELEMSLDVANKNNIELQKTI | |
| KKQSLTLTEIQAHYDEVQRQLQVTLDQYGIAQRKLQSVTAELEEIRGNYEG | |
| ALRAKRTAEQQYEETISRVNELTTINVNLASAKSKVEQELSTLAGDYDEVTR | |
| ELRAADERYQRVQVELKHTVEILHEEQERIVKIEAIKKSLEIEVKNLSVRLEE | |
| VEANAIVGGKRIISKLEARVRDLELELDEEKRRHAETIKILRKKERQVKEVMI | |
| QSEEDQKNVSLLQENLDKLVQRVNIYKRQLQEQEGMSQQSVTRVRRFQREL | |
| EAAEDRADTAESNLSLIRAKHRTFVTTSTVPGSQVYLVQETHRTTTTSEGI | |
| VHQVRLREYIDGPTPEPLSNYLDAQYYGPISLGTPPQKFKVVFDTGSSNLWV | NBGA7 |
| PSKKCHLTNIACLLHNKYDSTKSSTYEQNGTSFAIQYGSGSLSGFLSTDVLDI | |
| GGLKVQKQTFAEAMSEPGLAFVAAKFDGILGMAYSTISVDGVTPVFYNMV | |
| KQGLVSQPIFSFYLSRDPGAAEGGELILGGSDPNHYKGDFTYLSVDRKMYW | |
| QFKMDKIQIGNGSFCADGCEAIADTGTSLIAGPVSEVTALNRQIGGTPIVGGE | |
| YMVDCNLIPKLPEIDFILGGKKFTLEGKDYILRVSQLGHTVCLSGFMGIDLPK | |
| GPLWILGDVFIGKFYTEFDMENNRVGFAEAV | |
| HEGTPGHGSLLLEDTAGEKVRIIIDRFMDFREQEKKKLQSNPNLTVGDVTTV | NBGA8 |
| NLTQLKGGVQSNVVPPELVVVFDVRLAVTVDHAEFEAMVKKWCAEAGPG | |
| TYVEYEQKEPKVQVTKLDNSNPWWLAFKSACDDMNLELKPAIFPGGTDSR | |
| YVRGVGLPALGFSPMNKTPVLLHDHDEFLNEDIFLKGIDIFCQIIPAVANVAP | |
| PKK | |
| ALSPTTLGEAISSSTLRVFARTSVTGDLGIPEQQRYIEKVEELEAYQQQQQYK | NBGA9 |
| YVQELPESTSPPEFKTPIKDQPNIREGGFAHFEARLEPIGDSTLQVEWLKDGR | |
| PVEASSRITTFFNFGYVALTIKHVTTHDIGVYTCRAFNRLGQATTSAQLTVVS | |
| KKDIILESQHPGGLEKIQYLEDSSRYDRSTREETTVTQKPRFMG | |
| LFSTNILCDEIKNDEGVLVFTKENFKKGVSDNEFVLVEFYAPWCGHCKSLAP | NBGA10 |
| EYIKAAKKLADQESTIKLAKVDATEETELAEEHGVRGYPTLKFFRSGSPIDYS | |
| GGRTSDEIVSWLLKKTGPVAKDIASVDDAKSFIDASNVAIIGFFKDSSSEAAK | |
| NFLAAANAIDDYPFGITADDAVFGEYSVDGEKVILLQEV | |
| TREGERPMTKDNHLLGKFDLTGIPPAPRGVPQIEVTFEIDANGILQVSAEDKG | NBGA11 |
| TGNREKIVITNDQNRLTPDDIERMIKDAEKFADDDKKLKERVEARNELESYA | |
| YSLKNQLADKEKLGAKVSDSDKTKMEEAIDEKIKWLEENQDVDTEEYKTQ | |
| KKELEDIVQPIIAKLYQGAGGAPPPSNSDDDDELKDEL | |
| QITVTTDDIGQDVSGLELGALLTAMAMVTAKLATVETSCNAQAQEDNHQR | NBGA12 |
| PWLNSPSMATKDRTSMTSVSSTDSTLVYKIQPVNNAHGGGDRRCGVAGCS | |
| KDLNPGCPNELRVNNGCKSSCYAFNTDQYCCRGQYGTVETCDTSRWPVNS | |
| ASYFKSNCPDAYSYAYDDRTSTFTCDDRAYRTHHLLD | |
| SSLEVFFQQQRILLRLHRCFQVLGRWGGDVAFVKHLTALENTDGHNTAAW | NBGA13 |
| ASGLKSEDYELLCPDGGRAPVTEYLRCHLAQVPPHMVVTSNDKTENQLNEI | |
| RHAILAAGDLYSRRPDLFKLFGDFDGTKDLLFKNSATGLLSV | |
| RHQATQSTQQKKWYXKHCLQMASNTMPYQIASGFSTSQLAMIQNAIDEYH | NBGA14 |
| AKTCVTLRPYNSATDRDYVYIKGDESGCWSYVGRIGGRQELNLGTGCFSLG | |
| TVEHELLHAWGFYHQQSATERDDYVTIHWENIQSGTENN | |
| YGKIIKRLEAKGFKLVAMKFVWADEELLKKHYADLSSRPFFPGLVKYMSSG | NBGA15 |
| PVVPMVWEGLNVVKTGRLMLGATDPKDSNPGTIRGDLCIQVGRNIIHGSDS | |
| VESANKEINLWFDSKELIAWKPAVEAWVYED | |
| STRMELQHLQSIEVFPEDEGQYVCXAVNSIGTAKTTCKLKVKPMQDAGRKA | NBGA16 |
| KSGDKAPVIVDHLKSDFVKDGEPVILSCRIIGAQKFDVVWLHNNKEIKPSKD | |
| FQYTNEANIYKLNIAEIFPEDSGTYTC | |

TABLE 8
Diagnostic Sets (SEQ ID NOs.: 2031-2257)

| | | | Epitope |
|---|---|---|---|
| Sequence | Protein | Pos | Set |
| DCGVAGFRVDAAKHM | Bla g 11 alpha-amylase | 198 | AR |
| LDYERFRGSWIIAAG | Bla g 4 lipocalin | 26 | AR |
| KNRTTIRGRTKFEGN | Bla g 4 lipocalin | 71 | AR |
| IRGRTKFEGNKFTID | Bla g 4 lipocalin | 76 | AR |
| KFEGNKFTIDYNDKG | Bla g 4 lipocalin | 81 | AR |
| ATDYENYAIVEGCPA | Bla g 4 lipocalin | 106 | AR |
| NYAIVEGCPAAANGH | Bla g 4 lipocalin | 111 | AR |
| VIYVQIRFSVRRFHP | Bla g 4 lipocalin | 126 | AR |
| IRFSVRRFHPKLGDK | Bla g 4 lipocalin | 131 | AR |
| KLGDKEMIQHYTLDQ | Bla g 4 lipocalin | 141 | AR |
| KAIEEDLKHFNLKYE | Bla g 4 lipocalin | 161 | AR |
| KTPVLEIDGKQTHQS | Bla g 5 GST | 51 | AR |
| DENSKQKKWDPLKKE | Bla g 5 GST | 111 | AR |
| QKKWDPLKKETIPYY | Bla g 5 GST | 116 | AR |
| PLKKETIPYYTKKFD | Bla g 5 GST | 121 | AR |
| TIPYYTKKFDEVVKA | Bla g 5 GST | 126 | AR |
| TKKFDEVVKANGGYL | Bla g 5 GST | 131 | AR |
| YFVAILDYLNHMAKE | Bla g 5 GST | 156 | AR |
| QPNLKALREKVLGLP | Bla g 5 GST | 176 | AR |
| ALREKVLGLPAIKAW | Bla g 5 GST | 181 | AR |
| VLGLPAIKAWVAKRP | Bla g 5 GST | 186 | AR |
| VLEKLEAGFAKLAAS | Bla g 9 arginine kinase | 6 | AR |
| FGSTLLDVIQSGLEN | Bla g 9 arginine kinase | 46 | AR |
| NDIEKRVPFSHDDRL | Bla g 9 arginine kinase | 251 | AR |
| ALNSIQQFISSEMVE | NBGA1 | 541 | AR |
| VEALFLLMKADPSIH | NBGA1 | 716 | AR |
| DPSIHVLKMVAELTH | NBGA1 | 726 | AR |
| PKSMLLNIFTNNLGR | NBGA1 | 821 | AR |
| LNIFTNNLGRINTHV | NBGA1 | 826 | AR |
| KTLVKFVEGNLKYFN | NBGA1 | 871 | AR |
| LKYFNMGVQKFWAFD | NBGA1 | 881 | AR |
| MGVQKFWAFDNTTFS | NBGA1 | 886 | AR |
| NASAVIQEFLKTYKK | NBGA1 | 901 | AR |
| HTKLSSSSSITLTLP | NBGA1 | 921 | AR |
| SVNATVVRLQSWQSE | NBGA1 | 1451 | AR |
| VVRLQSWQSEMLRMN | NBGA1 | 1456 | AR |
| PRHGEQFYYFYQQIY | NBGA2 | 241 | AR |
| DYQSYRTLMRKVYDA | NBGA2 | 601 | AR |
| GQEYTFYVIVTPYAK | NBGA2 | 646 | AR |
| KAIFIKCDVTNIPEF | NBGA3 | 61 | AR |
| IVINNAGILNDEKWE | NBGA3 | 91 | AR |
| KEFANVVRVVRHTSK | NBGA4 | 346 | AR |
| RIKAFLALVECPCNK | NBGA4 | 566 | AR |
| FRKFSNNFEFSYLLG | NBGA4 | 636 | AR |
| NVIYSQNSFLPRATT | NBGA4 | 661 | AR |
| RLFGAEVGWLALHHN | NBGA4 | 781 | AR |
| LVYPTSLGFPLKLVL | NBGA4 | 836 | AR |
| SHVHFRFVPSAAVEF | NBGA4 | 876 | AR |
| KKLQFTYSESLDLDD | NBGA5 | 51 | AR |
| AQIQVVIHLDEQYIY | NBGA5 | 636 | AR |
| GVTPVFYNMVKQGLV | NBGA7 | 146 | AR |
| SEVTALNRQIGGTPI | NBGA7 | 241 | AR |
| GKDYILRVSQLGHTV | NBGA7 | 286 | AR |
| NAIEFLNNIHDLLGI | Bla g 1 midgut microvilli protein | 1 | Asthma |
| IDDIIAILPVDDLYA | Bla g 1 midgut microvilli protein | 36 | Asthma |
| LIPVDQIIAIATDYL | Bla g 1 midgut microvilli protein | 46 | Asthma |
| QIIAIATDYLANDAE | Bla g 1 midgut microvilli protein | 51 | Asthma |
| ATDYLANDAEVQAAV | Bla g 1 midgut microvilli protein | 56 | Asthma |
| EYQNLIQKLKDKGVD | Bla g 1 midgut microvilli protein | 86 | Asthma |
| IQKLKDKGVDVDHII | Bla g 1 midgut microvilli protein | 91 | Asthma |
| DKGVDVDHIIELIHQ | Bla g 1 midgut microvilli protein | 96 | Asthma |
| DTRGLPEDLQDFLAL | Bla g 1 midgut microvilli protein | 117 | Asthma |
| LIPTDQVLAIAADYL | Bla g 1 midgut microvilli protein | 131 | Asthma |
| QVLAIAADYLANDAE | Bla g 1 midgut microvilli protein | 136 | Asthma |
| LKALFNEKLETSPDF | Bla g 1 midgut microvilli protein | 152 | Asthma |
| EYLKSDEFETIVVTV | Bla g 1 midgut microvilli protein | 156 | Asthma |
| DEFETIVVTVDSLPE | Bla g 1 midgut microvilli protein | 161 | Asthma |
| IVVTVDSLPEFKNFL | Bla g 1 midgut microvilli protein | 166 | Asthma |
| DDLQDFLALIPVDQI | Bla g 1 midgut microvilli protein | 230 | Asthma |
| PVDQIIAIATDYLAN | Bla g 1 midgut microvilli protein | 240 | Asthma |
| IAIATDYLANDAEVQ | Bla g 1 midgut microvilli protein | 245 | Asthma |
| DYLANDAEVQAAVAY | Bla g 1 midgut microvilli protein | 250 | Asthma |
| DAEVQAAVAYLQSDE | Bla g 1 midgut microvilli protein | 255 | Asthma |
| AAVAYLQSDEFETIV | Bla g 1 midgut microvilli protein | 260 | Asthma |
| VTLDALPELQNFLNF | Bla g 1 midgut microvilli protein | 275 | Asthma |
| LPELQNFLNFLEANG | Bla g 1 midgut microvilli protein | 280 | Asthma |
| HDLLGIPHIPVSGRK | Bla g 1 midgut microvilli protein | 305 | Asthma |
| IPHIPVSGRKYHIRR | Bla g 1 midgut microvilli protein | 310 | Asthma |
| VSGRKYHIRRGVGIT | Bla g 1 midgut microvilli protein | 315 | Asthma |
| PIDQILAIAADYLAN | Bla g 1 midgut microvilli protein | 321 | Asthma |
| DYLANDAEVQAAVEY | Bla g 1 midgut microvilli protein | 331 | Asthma |
| VTVDSLPEFKNFLNF | Bla g 1 midgut microvilli protein | 356 | Asthma |
| LQTNGLNAIEFINNI | Bla g 1 midgut microvilli protein | 371 | Asthma |
| LNAIEFINNIHDLLG | Bla g 1 midgut microvilli protein | 376 | Asthma |
| ATGRKHVRRGVGING | Bla g 1 midgut microvilli protein | 396 | Asthma |
| HVRRGVGINGLIDDV | Bla g 1 midgut microvilli protein | 401 | Asthma |
| VGINGLIDDVIAILP | Bla g 1 midgut microvilli protein | 406 | Asthma |
| IAILPVDELYALFQE | Bla g 1 midgut microvilli protein | 416 | Asthma |
| KLESSPEFKALYDAI | Bla g 1 midgut microvilli protein | 431 | Asthma |
| PEFKALYDAIRSPEF | Bla g 1 midgut microvilli protein | 436 | Asthma |
| LYDAIRSPEFQSIVQ | Bla g 1 midgut microvilli protein | 441 | Asthma |
| RSPEFQSIVQTLKAM | Bla g 1 midgut microvilli protein | 446 | Asthma |
| QSIVQTLKAMPEYQD | Bla g 1 midgut microvilli protein | 451 | Asthma |
| TLKAMPEYQDLIQRL | Bla g 1 midgut microvilli protein | 456 | Asthma |
| IHENLIVTSPFRPWW | Bla g 11 alpha-amylase | 6 | Asthma |
| FRPWWERYQLVSYNL | Bla g 11 alpha-amylase | 16 | Asthma |
| ERYQLVSYNLNSRSG | Bla g 11 alpha-amylase | 21 | Asthma |
| RCNNVGIRIYVDVVL | Bla g 11 alpha-amylase | 103 | Asthma |
| GIRIYVDVVLNQMSG | Bla g 11 alpha-amylase | 108 | Asthma |
| RGNNAIKWLVNFGVG | Bla g 11 alpha-amylase | 278 | Asthma |
| GASILTYKTSKLYKM | Bla g 11 alpha-amylase | 318 | Asthma |
| KLYKMAVAFMLAYPY | Bla g 11 alpha-amylase | 328 | Asthma |
| WVCEHRWRQIFNMVG | Bla g 11 alpha-amylase | 383 | Asthma |
| RWRQIFNMVGFRNAV | Bla g 11 alpha-amylase | 388 | Asthma |
| LTVFDSTSCNVVVAS | Bla g 2 inactive aspartic protease | 51 | Asthma |
| STSCNVVVASQECVG | Bla g 2 inactive aspartic protease | 56 | Asthma |
| GRGIEDSLTISNLTT | Bla g 2 inactive aspartic protease | 106 | Asthma |
| SQQDIVLADELSQEV | Bla g 2 inactive aspartic protease | 121 | Asthma |
| AVLALCATDTLANED | Bla g 4 lipocalin | 1 | Asthma |
| CATDTLANEDCFRHE | Bla g 4 lipocalin | 6 | Asthma |
| LANEDCFRHESLVPN | Bla g 4 lipocalin | 11 | Asthma |
| PYSVLATDYENYAIV | Bla g 4 lipocalin | 101 | Asthma |
| VNQHKKAIEEDLKHF | Bla g 4 lipocalin | 156 | Asthma |
| KHFNLKYEDLHSTCH | Bla g 4 lipocalin | 168 | Asthma |
| MAPSYKLTYCPVKAL | Bla g 5 GST | 1 | Asthma |
| KLTYCPVKALGEPIR | Bla g 5 GST | 6 | Asthma |
| FLLSYGEKDFEDYRF | Bla g 5 GST | 21 | Asthma |
| GEKDFEDYRFQEGDW | Bla g 5 GST | 26 | Asthma |
| PNLKPSMPFGKTPVL | Bla g 5 GST | 41 | Asthma |
| QTHQSVAISRYLGKQ | Bla g 5 GST | 61 | Asthma |
| VAISRYLGKQFGLSG | Bla g 5 GST | 66 | Asthma |
| YLGKQFGLSGKDDWE | Bla g 5 GST | 71 | Asthma |
| KDDWENLEIDMIVDT | Bla g 5 GST | 81 | Asthma |
| NLEIDMIVDTISDFR | Bla g 5 GST | 86 | Asthma |
| MIVDTISDFRAAIAN | Bla g 5 GST | 91 | Asthma |
| ISDFRAAIANYHYDA | Bla g 5 GST | 96 | Asthma |
| AAIANYHYDADENSK | Bla g 5 GST | 101 | Asthma |
| YHYDADENSKQKKWD | Bla g 5 GST | 106 | Asthma |
| EVVKANGGYLAAGKL | Bla g 5 GST | 136 | Asthma |
| NGGYLAAGKLTWADF | Bla g 5 GST | 141 | Asthma |
| AAGKLTWADFYFVAI | Bla g 5 GST | 146 | Asthma |
| HMAKEDLVANQPNLK | Bla g 5 GST | 166 | Asthma |
| DLVANQPNLKALREK | Bla g 5 GST | 171 | Asthma |
| AAKFIIEEDSEAMEK | Bla g 6 troponin C | 76 | Asthma |
| IEEDSEAMEKELREA | Bla g 6 troponin C | 81 | Asthma |
| EAMEKELREAFRLYD | Bla g 6 troponin C | 86 | Asthma |
| ELREAFRLYDKEGNG | Bla g 6 troponin C | 91 | Asthma |
| FRLYDKEGNGYIPTS | Bla g 6 troponin C | 96 | Asthma |
| KEGNGYIPTSCLREI | Bla g 6 troponin C | 101 | Asthma |
| YIPTSCLREILRELD | Bla g 6 troponin C | 106 | Asthma |
| DELDMMIEEIDADGS | Bla g 6 troponin C | 126 | Asthma |
| KALQNAESEVAALNR | Bla g 7 tropomysin | 76 | Asthma |
| RSEERLATATAKLAE | Bla g 7 tropomysin | 101 | Asthma |
| VQKLQKEVDRLEDEL | Bla g 7 tropomysin | 246 | Asthma |
| KEVDRLEDELVHEKE | Bla g 7 tropomysin | 251 | Asthma |
| EAGFAKLAASDSKSL | Bla g 9 arginine kinase | 11 | Asthma |
| KLAASDSKSLLRKYL | Bla g 9 arginine kinase | 16 | Asthma |
| RCGRSMQGYPFNPCL | Bla g 9 arginine kinase | 126 | Asthma |
| LIDDHFLFKEGDRFL | Bla g 9 arginine kinase | 181 | Asthma |
| FLFKEGDRFLQHANA | Bla g 9 arginine kinase | 186 | Asthma |
| WCNEEDHLRIISMQM | Bla g 9 arginine kinase | 221 | Asthma |
| QVYRRLVTAVNDIEK | Bla g 9 arginine kinase | 241 | Asthma |
| RVPFSHDDRLGFLTF | Bla g 9 arginine kinase | 256 | Asthma |
| HDDRLGFLTFCPTNL | Bla g 9 arginine kinase | 261 | Asthma |
| CPTNLGTTVRASVRI | Bla g 9 arginine kinase | 271 | Asthma |
| SPYFVTNTEKMITEF | GroEL-like chaperonin | 201 | Asthma |
| KIGEYKNMIAEGIID | GroEL-like chaperonin | 481 | Asthma |
| RHNSAYKLHFNAFEY | NBGA1 | 226 | Asthma |
| STSLVKAHSMRNSAS | NBGA1 | 326 | Asthma |
| AVRLSKDIAADLQGE | NBGA1 | 461 | Asthma |
| LVRLLKQLKVSQIME | NBGA1 | 491 | Asthma |
| KQLKVSQIMEAARKL | NBGA1 | 496 | Asthma |
| QQFISSEMVEPKEAS | NBGA1 | 546 | Asthma |
| KNMTYVNTSLVLAFS | NBGA1 | 591 | Asthma |
| QKGYMVSSMTDLWEA | NBGA1 | 841 | Asthma |
| NTTFSNASAVIQEFL | NBGA1 | 896 | Asthma |
| PAYFKMNSPSLWKYN | NBGA1 | 941 | Asthma |
| MNITGSINLMFSQMY | NBGA1 | 976 | Asthma |
| SINLMFSQMYHAQLA | NBGA1 | 981 | Asthma |
| FSQMYHAQLAFSTAF | NBGA1 | 986 | Asthma |
| FQINLDFKNHNGFIR | NBGA1 | 1021 | Asthma |
| DVLQWQTIPYTTIHN | NBGA1 | 1046 | Asthma |
| VPIMNIYSAFEFDPN | NBGA1 | 1296 | Asthma |
| LRLSEHLDYVKNLTV | NBGA1 | 1336 | Asthma |
| AKRFAKWALPLYNKP | NBGA1 | 1476 | Asthma |
| HIVFPSYEIEMFYDG | NBGA1 | 1606 | Asthma |
| SYEIEMFYDGSRIMI | NBGA1 | 1611 | Asthma |
| RILLRLHRCFQVLGR | NBGA13 | 11 | Asthma |
| IRHAILAAGDLYSRR | NBGA13 | 101 | Asthma |
| QSYETKLLFDLFYYA | NBGA2 | 101 | Asthma |
| KLLFDLFYYANDYDT | NBGA2 | 106 | Asthma |
| HINEGQFLYALSSAL | NBGA2 | 131 | Asthma |
| QFLYALSSALFQRED | NBGA2 | 136 | Asthma |
| LNDYILPAPYEIYPW | NBGA2 | 151 | Asthma |
| EIYPWLFVDSDVIQR | NBGA2 | 161 | Asthma |
| LNTYYSYYYFNYPTF | NBGA2 | 216 | Asthma |
| SYYYFNYPTFFNSTE | NBGA2 | 221 | Asthma |
| DRRGEMFYYTRQQLY | NBGA2 | 241 | Asthma |
| MFYYTRQQLYARYFL | NBGA2 | 246 | Asthma |
| RQQLYARYFLERLSN | NBGA2 | 251 | Asthma |
| ARYFLERLSNDLPDV | NBGA2 | 256 | Asthma |
| QATDAYVRVFLGPKY | NBGA2 | 541 | Asthma |
| KELVEKYGKGKAIFI | NBGA3 | 51 | Asthma |
| EDAFKKAYNAFKSLD | NBGA3 | 76 | Asthma |
| AKGMMHMIKKGANGS | NBGA3 | 226 | Asthma |
| VYEVAIPDRLTLRVE | NBGA3 | 250 | Asthma |
| QTLFLLLLLLAAVSA | NBGA4 | 31 | Asthma |
| SLLLNGGCKVSNYDE | NBGA4 | 481 | Asthma |
| EVKIVATLKALQNAH | NBGA4 | 496 | Asthma |
| ISLEVLKNYQLDSEL | NBGA4 | 551 | Asthma |
| LKNYQLDSELRIKAF | NBGA4 | 556 | Asthma |
| QVGSFIVSYLRNLRA | NBGA4 | 596 | Asthma |
| THQFNVAGSVTVDKT | NBGA4 | 1156 | Asthma |
| LNQEAHYQFDSIHKF | NBGA4 | 1281 | Asthma |
| HYQFDSIHKFEFASK | NBGA4 | 1286 | Asthma |
| KAAVHLLVAVKASKE | NBGA5 | 511 | Asthma |
| WVPSKKCHLTNIACL | NBGA7 | 51 | Asthma |
| KCHLTNIACLLHNKY | NBGA7 | 56 | Asthma |
| DVLDIGGLKVQKQTF | NBGA7 | 101 | Asthma |
| DRKMYWQFKMDKIQI | NBGA7 | 201 | Asthma |
| GHSHFVSDVVLSSDG | RACK1 | 61 | Asthma |
| HGRTFSSLFQVANQY | NBGA1 | 56 | CNT |
| LLMKADPSIHVLKMV | NBGA1 | 721 | CNT |
| QVLSASQSAIKSAAN | NBGA1 | 746 | CNT |
| SKVHAIMNIGKECEN | NBGA1 | 1311 | CNT |
| FKRRVYKVYDFVRTH | NBGA1 | 1396 | CNT |
| EYFKVAFKPTSPVPN | NBGA1 | 1531 | CNT |
| TFEIDANGILQVSAE | NBGA11 | 36 | CNT |
| NNFEFSYLLGGANVG | NBGA4 | 641 | CNT |
| KLDSGLVYNPQLFDA | NBGA4 | 1426 | CNT |
| DLHVKGSQHVATVEL | NBGA4 | 1511 | CNT |
| LDSKNVLSILNYKTE | NBGA4 | 1546 | CNT |
| VLSILNYKTEVNVKG | NBGA4 | 1551 | CNT |
| QTLFAGYFDNTIRVW | RACK1 | 296 | CNT |
| VVFQQTKAIADKIKD | TPI | 141 | CNT |
| WSKVVIAYEPVWAIG | TPI | 156 | CNT |
| YWTIDFDIAVARVST | trypsin | 111 | CNT |

### Example 13

### Embodiments

[0308] A1. A protein or peptide having an amino acid sequence comprising, consisting of, or consisting essentially of an amino acid sequence set forth in Tables 5 to 8, or a subsequence, portion, homologue, variant or derivative thereof, for use in modulating immune activity of a cell against a Cockroach allergen.
[0309] A2. The protein or peptide of embodiment A1, wherein modulating the immune activity of a cell comprises inducing immunological tolerance to the Cockroach allergen.
[0310] A3. A protein or peptide having an amino acid sequence comprising, consisting of, or consisting essentially of an amino acid sequence set forth in Tables 5 to 8, or a subsequence, portion, homologue, variant or derivative thereof, for use in modulating an immune response against a Cockroach allergen in a subject.
[0311] A4. The protein or peptide of embodiment of A3, wherein the modulating of the immune response in the subject comprises administering to the subject an amount of the protein or peptide sufficient to modulate the immune response against the Cockroach allergen in the subject.
[0312] A5. A protein or peptide having an amino acid sequence comprising, consisting of, or consisting essentially of an amino acid sequence set forth in Tables 5 to 8, or a subsequence, portion, homologue, variant or derivative thereof, for use in preventing an allergic response, allergic disorder or allergic disease in a subject, or for use in preventing one or more physiological conditions, disorders, illnesses, diseases, symptoms or complications in a subject, wherein the allergic response, allergic disorder, allergic disease, or one or more physiological conditions, disorders, illnesses, diseases, symptoms or complications is caused by or associated with a Cockroach allergen.
[0313] A6. A protein or peptide having an amino acid sequence comprising, consisting of, or consisting essentially of an amino acid sequence set forth in Tables 5 to 8, or a subsequence, portion, homologue, variant or derivative thereof, for use in treating a subject for an allergic response, allergic disorder or allergic disease, or one or more physiological conditions, disorders, illnesses, diseases, symptoms or complications caused by or associated with a Cockroach allergen.
[0314] A7. The protein or peptide of embodiment A6, wherein treating comprises inducing in the subject immunological tolerance to the allergen.
[0315] A8. The protein or peptide of embodiment A6 or A7, comprising the use of two or more proteins, peptides, subsequences, portions, homologues, variants or derivatives thereof set forth in Tables 5-8.
[0316] A9. The protein or peptide of any one of embodiment A6 or A7, comprising the use of one protein, peptide, subsequence, portion, homologue, variant or derivative thereof as set forth in Tables 5-8.
[0317] A10. The protein or peptide of any one of embodiments A6 to A9, comprising the use of a peptide comprising an amino acid sequence of any of (SEQ ID NOs.: 1-23): TIPYYTKKFDEVVKA, ISDFRAAIANYHYDA, YFVAILDYLNHMAKE, VAISRYLGKQFGLSG, MIVDTISDFRAAIAN, DLVANQPNLKALREK, HDDRLGFLTFCPTNL, KNRTTIRGRTKFEGN, DRKMYWQFKMDKIQI, ALREKVLGLPAIKAW, IRGRTKFEGNKFTID, NDIEKRVPFSHDDRL, HMAKEDLVANQPNLK, VLEKLEAGFAKLAAS, NYAIVEGCPAAANGH, GIRIYVDVVLNQMSG, RWRQIFNMVGFRNAV, NIACLLHNKYDSTKS, NGGYLAAGKLTWADF, LNIFTNNLGRINTHV, KTPVLEIDGKQTHQS, PAYFKMNSPSLWKYN, PKSMLLNIFTNNLGR, or a subsequence, portion, homologue, variant or derivative thereof, or a combination thereof.
[0318] A11. The protein or peptide of any one of embodiments A6 to A9, comprising the use of a peptide comprising an amino acid sequence of any of (SEQ ID NOs.: 1-23): TIPYYTKKFDEVVKA, ISDFRAAIANYHYDA, YFVAILDYLNHMAKE, VAISRYLGKQFGLSG, MIVDTISDFRAAIAN, DLVANQPNLKALREK, HDDRLGFLTFCPTNL, KNRTTIRGRTKFEGN, DRKMYWQFKMDKIQI, ALREKVLGLPAIKAW, IRGRTKFEGNKFTID, NDIEKRVPFSHDDRL, HMAKEDLVANQPNLK, VLEKLEAGFAKLAAS, NYAIVEGCPAAANGH, GIRIYVDVVLNQMSG, RWRQIFNMVGFRNAV, NIACLLHNKYDSTKS, NGGYLAAGKLTWADF, LNIFTNNLGRINTHV, KTPVLEIDGKQTHQS, PAYFKMNSPSLWKYN, PKSMLLNIFTNNLGR, or a combination thereof.
[0319] A12. The protein or peptide of any one of embodiments A6 to A9, comprising the use of a peptide comprising an amino acid sequence of any of (SEQ ID NOs.: 234-45): FETIVVTVDSLPEFK, LIDDVLAILPLDDLK, FAVATITHAAELQRV, PLYKLVHVFINTQYA, GNQNFLTVFDSTSCN, ISSQYYIQQNGNLC, HFFIGDFFVDHYYSE, GEPIRFLLSYGEKDF, FLLSYGEKDFEDYRF, SMPFGKTPVLEIDGK, VAISRYLGKQFGLSG, ISDFRAAIANYHYDA, YFVAILDYLNHMAKE, HMAKEDLVANQPNLK, DLVANQPNLKALREK, ALREKVLGLPAIKAW, VLGLPAIKAWVAKRP, EQISVLRKAFDAFDR, LRKAFDAFDREKSGS, EFVTLAAKFIIEEDS, EAMEKELREAFRLYD, or SGTVDFDEFMEMMTG.
[0320] A13. A protein or peptide having an amino acid sequence comprising, consisting of, or consisting essentially of an amino acid sequence set forth in Tables 5 to 8, or a subsequence, portion, homologue, variant or derivative thereof, for use in diagnosing and treating a Cockroach allergy in a subject.
[0321] A14. The protein or peptide of embodiment A13, wherein the diagnosing comprises contacting a cell from the subject with the protein or peptide, determining if the protein or peptide modulates immune activity from the contacted cell, wherein a determination that the protein or peptide modulates immune activity from the contacted cell indicates that the subject has a Cockroach allergy.
[0322] A15. A protein or peptide having an amino acid sequence comprising, consisting of, or consisting essentially of an amino acid sequence set forth in Tables 5 to 8, or a subsequence, portion, homologue, variant or derivative thereof, for use in detecting an allergic response to a Cockroach protein or peptide in a subject.
[0323] A16. The protein or peptide of embodiment A15, comprising:
   [0324] i. contacting a cell from the subject with the protein or peptide; and
   [0325] ii. determining if the protein or peptide modulates immune activity from the contacted cell; wherein a determination that the protein or peptide modulates immune activity from the contacted cell thereby detects an allergic response to the Cockroach allergen in the subject.
[0326] A17. The protein or peptide of any one of embodiments A1 to A16, wherein the protein or peptide comprises, consists of, or consists essentially of an amino acid sequence set forth in Table 8.
[0327] A16. The protein or peptide of any one of embodiments A1 to A17, wherein the subject is a human.

### REFERENCES

[0328] 1. Kanchongkittiphon W, Mendell M J, Gaffin J M, Wang G, Phipatanakul W. Indoor Environmental Exposures and Exacerbation of Asthma: An Update to the 2000 Review by the Institute of Medicine. Environ Health Perspect 2014;
[0329] 2. Camelo-Nunes I C, Solé D. Cockroach allergy: risk factor for asthma severity. J Pediatr (Rio J) 2006; 82:398-9-authorreply399-400.
[0330] 3. Yi M-H, Jeong K Y, Kim C-R, Yong T-S. IgE-binding reactivity of peptide fragments of Bla g 1.02, a major German cockroach allergen. Asian Pac J Allergy Immunol 2009; 27:121-9.
[0331] 4. Jeong K Y, Lee J, Lee I-Y, Ree H-I, Hong C-S, Yong T-S. Allergenicity of recombinant Bla g 7, German cockroach tropomyosin. Allergy 2003; 58:1059-63.
[0332] 5. Pomes A, Vailes L D, Helm R M, Chapman M D. IgE reactivity of tandem repeats derived from cockroach allergen, Bla g 1. Eur J Biochem 2002; 269:3086-92.
[0333] 6. Shin K H, Jeong K Y, Hong C-S, Yong T-S. IgE binding reactivity of peptide fragments of Bla g 4, a major German cockroach allergen. Korean J Parasitol 2009; 47:31-6.
[0334] 7. Jeong K-J, Jeong K Y, Kim C-R, Yong T-S. IgE-binding epitope analysis of Bla g 5, the German cockroach allergen. Protein Pept Lett 2010; 17:573-7.
[0335] 8. Khurana T, Collison M, Chew F T, Slater J E. Bla g 3: a novel allergen of German cockroach identified using cockroach-specific avian single-chain variable fragment antibody. Ann Allergy Asthma Immunol 2014; 112:140-1.
[0336] 9. Un S, Jeong K Y, Yi M-H, Kim C-R, Yong T-S. IgE binding epitopes of Bla g 6 from German cockroach. Protein Pept Lett 2010; 17:1170-6.
[0337] 10. Lee H, Jeong K Y, Shin K H, Yi M-H, Gantulaga D, Hong C-S, et al. Reactivity of German cockroach allergen, Bla g 2, peptide fragments to IgE antibodies in patients' sera. Korean J Parasitol 2008; 46:243-6.
[0338] 11. Jeong K Y, Kim C-R, Park J, Han I-S, Park J-W, Yong T-S. Identification of novel allergenic components from German cockroach fecal extract by a proteomic approach. Int Arch Allergy Immunol 2013; 161:315-24.
[0339] 12. Arruda L K, Barbosa M C R, Santos A B R, Moreno A S, Chapman M D, Pomés A. Recombinant allergens for diagnosis of cockroach allergy. Curr Allergy Asthma Rep 2014; 14:428.
[0340] 13. Arruda L K, Vailes L D, Ferriani V P, Santos A B, Pomes A, Chapman M D. Cockroach allergens and asthma. Journal of Allergy and Clinical Immunology 2001; 107:419-28.
[0341] 14. Chen H, Yang H-W, Wei J-F, Tao A-L. In silico prediction of the T-cell and IgE-binding epitopes of Per a 6 and Bla g 6 allergens in cockroaches. Mol Med Rep 2014; 10:2130-6.
[0342] 15. Oseroff C, Sidney J, Tripple V, Grey H, Wood R, Broide D H, et al. Analysis of T cell responses to the major allergens from German cockroach: epitope specificity and relationship to IgE production. The Journal of Immunology 2012; 189:679-88.
[0343] 16. Schulten V, Greenbaum J A, Hauser M, McKinney D M, Sidney J, Kolla R, et al. Previously undescribed grass pollen antigens are the major inducers of T helper 2 cytokine-producing T cells in allergic individuals. Proc Natl Acad Sci USA 2013; 110:3459-64.
[0344] 17. Chuang J-G, Su S-N, Chiang B-L, Lee H-J, Chow L-P. Proteome mining for novel IgE-binding proteins from the German cockroach (Blattella germanica) and allergen profiling of patients. Proteomics [Internet] 2010; 10:3854-67. Available from: http://onlinelibrary.wiley.com/doi/10.1002/pmic.201000348/abstract;jsessionid=9718A2AA03D4059 1B9C468E16B09A498.f02t04
[0345] 18. Oseroff C, Sidney J, Kotturi M F, Kolla R, Alam R, Broide D H, et al. Molecular Determinants of T Cell Epitope Recognition to the Common Timothy Grass Allergen. The Journal of Immunology 2010; 185:943-55.
[0346] 19. Wambre E, Bonvalet M, Bodo V B, Maillère B, Leclert G, Moussu H, et al. Distinct characteristics of seasonal (Bet v 1) vs. perennial (Der p 1/Der p 2) allergen-specific CD4(+) T cell responses. Clin Exp Allergy 2011; 41:192-203.
[0347] 20. Lindestam Arlehamn C S, Sidney J, Henderson R, Greenbaum J A, James E A, Moutaftsi M, et al. Dissecting Mechanisms of Immunodominance to the Common Tuberculosis Antigens ESAT-6, CFP10, Rv2031c (hspX), Rv2654c (TB7.7), and Rv1038c (EsxJ). The Journal of Immunology 2012; 188:5020-31.
[0348] 21. Scadding G. Cytokine profiles in allergic rhinitis. Curr Allergy Asthma Rep 2014; 14:435.
[0349] 22. Maes T, Joos G F, Brusselle G G. Targeting interleukin-4 in asthma: lost in translation? Am J Respir Cell Mol Biol 2012; 47:261-70.
[0350] 23. Cosmi L, Liotta F, Maggi E, Romagnani S, Annunziato F. Th17 cells: new players in asthma pathogenesis. Allergy 2011; 66:989-98.
[0351] 24. Ota K, Kawaguchi M, Matsukura S, Kurokawa M, Kokubu F, Fujita J, et al. Review Article. Journal of Immunology Research 2014; 1-8.
[0352] 25. Zhang H, Kong H, Zeng X, Guo L, Sun X, He S. Subsets of regulatory T cells and their roles in allergy. Journal of Translational Medicine 2014; 12:125.
[0353] 26. Schulten V, Oseroff C, Alam R, Broide D, Vijayanand P, Peters B, et al. The identification of potentially pathogenic and therapeutic epitopes from common human allergens. Ann Allergy Asthma Immunol 2013; 110:7-10.
[0354] 27. Crotty S. Follicular helper CD4 T cells (TFH). Annu Rev Immunol 2011; 29:621-63.
[0355] 28. Bassirpour G, Zoratti E. Cockroach allergy and allergen-specific immunotherapy in asthma. Current Opinion in Allergy and Clinical Immunology 2014; 1.
[0356] 29. Pomés A, Arruda L K. Investigating cockroach allergens: aiming to improve diagnosis and treatment of cockroach allergic patients. Methods 2014; 66:75-85.
[0357] 30. Mukherjee S, Berger M F, Jona G, Wang X S, Muzzey D, Snyder M, et al. Rapid analysis of the DNA-binding specificities of transcription factors with DNA microarrays. Nat Genet 2004; 36:1331-9.
[0358] 31. Kumar S, Blaxter M L. Comparing de novo assemblers for 454 transcriptome data. BMC Genomics 2010; 11:571.
[0359] 32. The use of standardized allergen extracts. American Academy of Allergy, Asthma and Immunology (AAAAI). J. Allergy Clin. Immunol.1997; 99:583-6.
[0360] 33. Lopes M I L, Miranda P J, Sarinho E. Use of the skin prick test and specific immunoglobulin E for the diagnosis of cockroach allergy. J Pediatr (Rio J) 2006; 82:204-9.
[0361] 34. Schulten V, Tripple V, Sidney J, Greenbaum J, Frazier A, Alam R, et al. Association between specific timothy grass antigens and changes in TH1- and TH2-cell responses following specific immunotherapy. J Allergy Clin Immunol 2014; 134:1076-83.

What is claimed is:

1. A protein or peptide having an amino acid sequence comprising, consisting of or consisting essentially of an amino acid sequence set forth in Tables 5-8, or a subsequence, portion, homologue, variant or derivative thereof.

2. The protein or peptide of claim 1, wherein the protein or peptide modulates, inhibits or reduces an anti-allergen immune response.

3. The protein or peptide of claim 2, wherein the anti-allergen immune response comprises a T cell response.

4. The protein or peptide of claim 2 or 3, wherein the anti-allergen immune response comprises a T cell response against a Cockroach allergen.

5. The protein or peptide of claim 1, wherein the protein or peptide is an amino acid sequence set forth in Table 6, or a subsequence, portion, homologue, variant or derivative thereof.

6. The protein or peptide of claim 1, wherein the protein or peptide is an amino acid sequence of any of: TIPYYTKKFDEVVKA, ISDFRAAIANYHYDA, YFVAILDYLNHMAKE, VAISRYLGKQFGLSG, MIVDTISDFRAAIAN, DLVANQPNLKALREK, HDDRLGFLTFCPTNL, KNRTTIRGRTKFEGN, DRKMYWQFKMDKIQI, ALREKVLGLPAIKAW, IRGRTKFEGNKFTID, NDIEKRVPFSHDDRL, HMAKEDLVANQPNLK, VLEKLEAGFAKLAAS, NYAIVEGCPAAANGH, GIRIYVDVVLNQMSG, RWRQIFNMVGFRNAV, NIACLLHNKYDSTKS, NGGYLAAGKLTWADF, LNIFTNNLGRINTHV, KTPVLEIDGKQTHQS, PAYFKMNSPSLWKYN, PKSMLLNIFTNNLGR, or a subsequence, portion, homologue, variant or derivative thereof, or a combination thereof.

7. The protein or peptide of claim 1, wherein the protein or peptide is an amino acid sequence of any of: TIPYYTKKFDEVVKA, ISDFRAAIANYHYDA, YFVAILDYLNHMAKE, VAISRYLGKQFGLSG, MIVDTISDFRAAIAN, DLVANQPNLKALREK, HDDRLGFLTFCPTNL, KNRTTIRGRTKFEGN, DRKMYWQFKMDKIQI, ALREKVLGLPAIKAW, IRGRTKFEGNKFTID, NDIEKRVPFSHDDRL, HMAKEDLVANQPNLK, VLEKLEAGFAKLAAS, NYAIVEGCPAAANGH, GIRIYVDVVLNQMSG, RWRQIFNMVGFRNAV, NIACLLHNKYDSTKS, NGGYLAAGKLTWADF, LNIFTNNLGRINTHV, KTPVLEIDGKQTHQS, PAYFKMNSPSLWKYN, PKSMLLNIFTNNLGR, or a combination thereof.

8. The protein or peptide of claim 1, wherein the protein or peptide is not identical to an amino acid sequence of any of: FETIVVTVDSLPEFK, LIDDVLAILPLDDLK, FAVATITHAAELQRV, PLYKLVHVFINTQYA, GNQNFLTVFDSTSCN, ISSQYYIQQNGNLC, HFFIGDFFVDHYYSE, GEPIRFLLSYGEKDF, FLLSYGEKDFEDYRF, SMPFGKTPVLEIDGK, VAISRYLGKQFGLSG, ISDFRAAIANYHYDA, YFVAILDYLNHMAKE, HMAKEDLVANQPNLK, DLVANQPNLKALREK, ALREKVLGLPAIKAW, VLGLPAIKAWVAKRP, EQISVLRKAFDAFDR, LRKAFDAFDREKSGS, EFVTLAAKFIIEEDS, EAMEKELREAFRLYD, or SGTVDFDEFMEMMTG.

9. A composition comprising the protein or peptide of claims 1-8.

10. The composition of claim 9, further comprising a pharmaceutically acceptable carrier, diluent or excipient.

11. The composition of claim 9, further comprising an adjuvant.

12. A vaccine comprising the protein or peptide of claims 1-11.

13. A unit dosage form comprising the composition or vaccine of any of claims 9 to 13.

14. A method of modulating immune activity of a cell against a Cockroach allergen, the method comprising contacting the cell with an amount of protein or peptide having an amino acid sequence comprising, consisting of or consisting essentially of an amino acid sequence set forth in Tables 5-8, or a subsequence, portion, homologue, variant or derivative thereof, sufficient to modulate the immune activity of the cell against the Cockroach allergen.

15. The method of claim 14, wherein the method comprises inducing in the cell immunological tolerance to the Cockroach allergen.

16. A method of modulating immune response against a Cockroach allergen in a subject, comprising administering to the subject an amount of protein or peptide having and an amino acid sequence comprising, consisting of or consisting essentially of an amino acid sequence set forth in Tables 5-8, or a subsequence, portion, homologue, variant or derivative thereof, sufficient to modulate the immune response against the Cockroach allergen in the subject.

17. A method of providing a subject protection against an allergic response, allergic disorder or allergic disease, or one or more physiological conditions, disorders, illnesses, diseases, symptoms or complications caused by or associated with a Cockroach allergen, comprising administering to the subject an amount of protein or peptide having an amino acid sequence comprising, consisting of or consisting essentially of an amino acid sequence set forth in Tables 5-8, or a subsequence, portion, homologue, variant or derivative thereof, sufficient to provide the subject with protection against the allergic response, allergic disorder or allergic disease, or one or more physiological conditions, disorders, illnesses, diseases, symptoms or complications caused by or associated with the Cockroach allergen.

18. A method of treating a subject for an allergic response, allergic disorder or allergic disease, or one or more physiological conditions, disorders, illnesses, diseases, symptoms or complications caused by or associated with a Cockroach allergen, comprising administering to the subject an amount of protein or peptide having an amino acid sequence comprising, consisting of or consisting essentially of an amino acid sequence set forth in Tables 5-8, or a subsequence, portion, homologue, variant or derivative thereof, sufficient to treat the subject for the allergic response, allergic disorder or allergic disease, or one or more physiological conditions, disorders, illnesses, diseases, symptoms or complications caused by or associated with the Cockroach allergen.

19. The method of any one of claims 16 to 18, wherein the method comprises inducing in the subject immunological tolerance to the allergen.

20. The method of any one of claims 16 to 18, comprising administering to the subject two or more proteins, peptides, subsequences, portions, homologues, variants or derivatives thereof set forth in Tables 5-8

21. The method of any one of claims 16 to 18, comprising administering to the subject an amino acid sequence set forth in Table 6, or a subsequence, portion, homologue, variant or derivative thereof.

22. The method of any one of claims 16 to 18, comprising administering to the subject an amino acid sequence of any of: TIPYYTKKFDEVVKA, ISDFRAAIANYHYDA, YFVAILDYLNHMAKE, VAISRYLGKQFGLSG, MIVDTISDFRAAIAN, DLVANQPNLKALREK, HDDRLGFLTFCPTNL, KNRTTIRGRTKFEGN, DRKMYWQFKMDKIQI, ALREKVLGLPAIKAW, IRGRTKFEGNKFTID, NDIEKRVPFSHDDRL, HMAKEDLVANQPNLK, VLEKLEAGFAKLAAS, NYAIVEGCPAAANGH, GIRIYVDVVLNQMSG, RWRQIFNMVGFRNAV, NIACLLHNKYDSTKS, NGGYLAAGKLTWADF, LNIFTNNLGRINTHV, KTPVLEIDGKQTHQS, PAYFKMNSPSLWKYN, PKSMLLNIFTNNLGR, or a subsequence, portion, homologue, variant or derivative thereof, or a combination thereof.

23. The method of any one of claims 16 to 18, comprising administering to the subject an amino acid sequence of any of: TIPYYTKKFDEVVKA, ISDFRAAIANYHYDA, YFVAILDYLNHMAKE, VAISRYLGKQFGLSG, MIVDTISDFRAAIAN, DLVANQPNLKALREK, HDDRLGFLTFCPTNL, KNRTTIRGRTKFEGN, DRKMYWQFKMDKIQI, ALREKVLGLPAIKAW, IRGRTKFEGNKFTID, NDIEKRVPFSHDDRL, HMAKEDLVANQPNLK, VLEKLEAGFAKLAAS, NYAIVEGCPAAANGH, GIRIYVDVVLNQMSG, RWRQIFNMVGFRNAV, NIACLLHNKYDSTKS, NGGYLAAGKLTWADF, LNIFTNNLGRINTHV, KTPVLEIDGKQTHQS, PAYFKMNSPSLWKYN, PKSMLLNIFTNNLGR, or a combination thereof.

24. The method of any one of claims 16 to 18, comprising administering to the subject a protein or peptide that is not identical to an amino acid sequence of any of: FETIVVTVDSLPEFK, LIDDVLAILPLDDLK, FAVATITHAAELQRV, PLYKLVHVFINTQYA, GNQNFLTVFDSTSCN, ISSQYYIQQNGNLC, HFFIGDFFVDHYYSE, GEPIRFLLSYGEKDF, FLLSYGEKDFEDYRF, SMPFGKTPVLEIDGK, VAISRYLGKQFGLSG, ISDFRAAIANYHYDA, YFVAILDYLNHMAKE, HMAKEDLVANQPNLK, DLVANQPNLKALREK, ALREKVLGLPAIKAW, VLGLPAIKAWVAKRP, EQISVLRKAFDAFDR, LRKAFDAFDREKSGS, EFVTLAAKFIIEEDS, EAMEKELREAFRLYD, or SGTVDFDEFMEMMTG.

25. A method of diagnosing and treating a Cockroach allergy in a subject, the method comprising:
i. contacting a cell from the subject with a protein or peptide having an amino acid sequence comprising, consisting of or consisting essentially of an amino acid sequence set forth in Tables 5-8, or a subsequence, portion, homologue, variant or derivative thereof; and
ii. determining if of protein, peptide, or a subsequence, portion, homologue, variant or derivative thereof, modulates immune activity from the contacted cell; wherein determination that the protein or peptide modulates immune activity from the contacted cell indicates that the subject has a Cockroach allergy; and optionally
iii. treating the subject having the Cockroach allergy for the Cockroach allergy.

26. A method of detecting an allergic response to a Cockroach protein or peptide in a subject, the method comprising:
i. contacting a cell from the subject with a protein or peptide having an amino acid sequence comprising, consisting of or consisting essentially of an amino acid sequence set forth in Tables 5-8, or a subsequence, portion, homologue, variant or derivative thereof; and
ii. determining if the protein or peptide modulates immune activity from the contacted cell; wherein determination that the protein or peptide modulates immune activity from the contacted cell thereby detects an allergic response to the Cockroach allergen in the subject.

27. The method of any one of claim 25 or 26, wherein the protein or peptide having an amino acid sequence comprising, consisting of or consisting essentially of an amino acid sequence set forth in Table 8.

28. The method of any one of claim 16 to 18, 25 or 26, wherein the subject is a human.

The application's sequence listing, which the Patent Office published only in electronic form, follows.

SEQUENCE LISTING (2257 sequences)

SEQ ID NO: 1 - protein, 15 aa, Blattella germanica
TIPYYTKKFDEVVKA

SEQ ID NO: 2 - protein, 15 aa, Blattella germanica
ISDFRAAIANYHYDA

SEQ ID NO: 3 - protein, 15 aa, Blattella germanica
YFVAILDYLNHMAKE

SEQ ID NO: 4 - protein, 15 aa, Blattella germanica
VAISRYLGKQFGLSG

SEQ ID NO: 5 - protein, 15 aa, Blattella germanica
MIVDTISDFRAAIAN

SEQ ID NO: 6 - protein, 15 aa, Blattella germanica
DLVANQPNLKALREK

SEQ ID NO: 7 - protein, 15 aa, Blattella germanica
HDDRLGFLTFCPTNL

SEQ ID NO: 8 - protein, 15 aa, Blattella germanica
KNRTTIRGRTKFEGN

SEQ ID NO: 9 - protein, 15 aa, Blattella germanica
DRKMYWQFKMDKIQI

SEQ ID NO: 10 - protein, 15 aa, Blattella germanica
ALREKVLGLPAIKAW

SEQ ID NO: 11 - protein, 15 aa, Blattella germanica
IRGRTKFEGNKFTID

SEQ ID NO: 12 - protein, 15 aa, Blattella germanica
NDIEKRVPFSHDDRL

SEQ ID NO: 13 - protein, 15 aa, Blattella germanica
HMAKEDLVANQPNLK

SEQ ID NO: 14 - protein, 15 aa, Blattella germanica
VLEKLEAGFAKLAAS

SEQ ID NO: 15 - protein, 15 aa, Blattella germanica
NYAIVEGCPAAANGH

SEQ ID NO: 16 - protein, 15 aa, Blattella germanica
GIRIYVDVVLNQMSG

SEQ ID NO: 17 - protein, 15 aa, Blattella germanica
RWRQIFNMVGFRNAV

SEQ ID NO: 18 - protein, 15 aa, Blattella germanica
NIACLLHNKYDSTKS

SEQ ID NO: 19 - protein, 15 aa, Blattella germanica
NGGYLAAGKLTWADF

SEQ ID NO: 20 - protein, 15 aa, Blattella germanica
LNIFTNNLGRINTHV

SEQ ID NO: 21 - protein, 15 aa, Blattella germanica
KTPVLEIDGKQTHQS

SEQ ID NO: 22 - protein, 15 aa, Blattella germanica
PAYFKMNSPSLWKYN

SEQ ID NO: 23 - protein, 15 aa, Blattella germanica
PKSMLLNIFTNNLGR

SEQ ID NO: 24 - protein, 15 aa, Blattella germanica
FETIVVTVDSLPEFK

SEQ ID NO: 25 - protein, 15 aa, Blattella germanica
LIDDVLAILPLDDLK

SEQ ID NO: 26 - protein, 15 aa, Blattella germanica
FAVATITHAAELQRV

SEQ ID NO: 27 - protein, 15 aa, Blattella germanica
PLYKLVHVFINTQYA

SEQ ID NO: 28 - protein, 15 aa, Blattella germanica
GNQNFLTVFDSTSCN

SEQ ID NO: 29 - protein, 14 aa, Blattella germanica
ISSQYYIQQNGNLC

SEQ ID NO: 30 - protein, 15 aa, Blattella germanica
HFFIGDFFVDHYYSE

SEQ ID NO: 31 - protein, 15 aa, Blattella germanica
GEPIRFLLSYGEKDF

SEQ ID NO: 32 - protein, 15 aa, Blattella germanica
FLLSYGEKDFEDYRF

SEQ ID NO: 33 - protein, 15 aa, Blattella germanica
SMPFGKTPVLEIDGK

SEQ ID NO: 34 - protein, 15 aa, Blattella germanica
VAISRYLGKQFGLSG

SEQ ID NO: 35 - protein, 15 aa, Blattella germanica
ISDFRAAIANYHYDA

SEQ ID NO: 36 - protein, 15 aa, Blattella germanica
YFVAILDYLNHMAKE

SEQ ID NO: 37 - protein, 15 aa, Blattella germanica
HMAKEDLVANQPNLK

SEQ ID NO: 38 - protein, 15 aa, Blattella germanica
DLVANQPNLKALREK

SEQ ID NO: 39 - protein, 15 aa, Blattella germanica
ALREKVLGLPAIKAW

SEQ ID NO: 40 - protein, 15 aa, Blattella germanica
VLGLPAIKAWVAKRP

SEQ ID NO: 41 - protein, 15 aa, Blattella germanica
EQISVLRKAFDAFDR

SEQ ID NO: 42 - protein, 15 aa, Blattella germanica
LRKAFDAFDREKSGS

SEQ ID NO: 43 - protein, 15 aa, Blattella germanica
EFVTLAAKFIIEEDS

SEQ ID NO: 44 - protein, 15 aa, Blattella germanica
EAMEKELREAFRLYD

SEQ ID NO: 45 - protein, 15 aa, Blattella germanica
SGTVDFDEFMEMMTG

SEQ ID NO: 46 - protein, 15 aa, Blattella germanica
NAIEFLNNIHDLLGI

SEQ ID NO: 47 - protein, 15 aa, Blattella germanica
IDDIIAILPVDDLYA

SEQ ID NO: 48 - protein, 15 aa, Blattella germanica
LIPVDQIIAIATDYL

SEQ ID NO: 49 - protein, 15 aa, Blattella germanica
QIIAIATDYLANDAE

SEQ ID NO: 50 - protein, 15 aa, Blattella germanica
ATDYLANDAEVQAAV

SEQ ID NO: 51 - protein, 15 aa, Blattella germanica
EYQNLIQKLKDKGVD

SEQ ID NO: 52 - protein, 15 aa, Blattella germanica
IQKLKDKGVDVDHII

SEQ ID NO: 53 - protein, 15 aa, Blattella germanica
DKGVDVDHIIELIHQ

SEQ ID NO: 54 - protein, 15 aa, Blattella germanica
DTRGLPEDLQDFLAL

SEQ ID NO: 55 - protein, 15 aa, Blattella germanica
LIPTDQVLAIAADYL

SEQ ID NO: 56 - protein, 15 aa, Blattella germanica
QVLAIAADYLANDAE

SEQ ID NO: 57 - protein, 15 aa, Blattella germanica
LKALFNEKLETSPDF

SEQ ID NO: 58 - protein, 15 aa, Blattella germanica
EYLKSDEFETIVVTV

SEQ ID NO: 59 - protein, 15 aa, Blattella germanica
DEFETIVVTVDSLPE

SEQ ID NO: 60 - protein, 15 aa, Blattella germanica
IVVTVDSLPEFKNFL

SEQ ID NO: 61 - protein, 15 aa, Blattella germanica
DDLQDFLALIPVDQI

SEQ ID NO: 62 - protein, 15 aa, Blattella germanica
PVDQIIAIATDYLAN

SEQ ID NO: 63 - protein, 15 aa, Blattella germanica
IAIATDYLANDAEVQ

SEQ ID NO: 64 - protein, 15 aa, Blattella germanica
DYLANDAEVQAAVAY

SEQ ID NO: 65 - protein, 15 aa, Blattella germanica
DAEVQAAVAYLQSDE

SEQ ID NO: 66 - protein, 15 aa, Blattella germanica
AAVAYLQSDEFETIV

SEQ ID NO: 67 - protein, 15 aa, Blattella germanica
VTLDALPELQNFLNF

SEQ ID NO: 68 - protein, 15 aa, Blattella germanica
LPELQNFLNFLEANG

SEQ ID NO: 69 - protein, 15 aa, Blattella germanica
HDLLGIPHIPVSGRK

SEQ ID NO: 70 - protein, 15 aa, Blattella germanica
IPHIPVSGRKYHIRR

SEQ ID NO: 71 - protein, 15 aa, Blattella germanica
VSGRKYHIRRGVGIT

SEQ ID NO: 72 - protein, 15 aa, Blattella germanica
PIDQILAIAADYLAN

SEQ ID NO: 73 - protein, 15 aa, Blattella germanica
DYLANDAEVQAAVEY

SEQ ID NO: 74 - protein, 15 aa, Blattella germanica
VTVDSLPEFKNFLNF

SEQ ID NO: 75 - protein, 15 aa, Blattella germanica
LQTNGLNAIEFINNI

SEQ ID NO: 76 - protein, 15 aa, Blattella germanica
LNAIEFINNIHDLLG

SEQ ID NO: 77 - protein, 15 aa, Blattella germanica
ATGRKHVRRGVGING

SEQ ID NO: 78 - protein, 15 aa, Blattella germanica
HVRRGVGINGLIDDV

SEQ ID NO: 79 - protein, 15 aa, Blattella germanica
VGINGLIDDVIAILP

SEQ ID NO: 80 - protein, 15 aa, Blattella germanica
IAILPVDELYALFQE

SEQ ID NO: 81 - protein, 15 aa, Blattella germanica
KLESSPEFKALYDAI

SEQ ID NO: 82 - protein, 15 aa, Blattella germanica
PEFKALYDAIRSPEF

SEQ ID NO: 83 - protein, 15 aa, Blattella germanica
LYDAIRSPEFQSIVQ

SEQ ID NO: 84 - protein, 15 aa, Blattella germanica
RSPEFQSIVQTLKAM

SEQ ID NO: 85 - protein, 15 aa, Blattella germanica
QSIVQTLKAMPEYQD

SEQ ID NO: 86 - protein, 15 aa, Blattella germanica
TLKAMPEYQDLIQRL

SEQ ID NO: 87 - protein, 15 aa, Blattella germanica
IHENLIVTSPFRPWW

SEQ ID NO: 88 - protein, 15 aa, Blattella germanica
FRPWWERYQLVSYNL

SEQ ID NO: 89 - protein, 15 aa, Blattella germanica
ERYQLVSYNLNSRSG

SEQ ID NO: 90 - protein, 15 aa, Blattella germanica
RCNNVGIRIYVDVVL

SEQ ID NO: 91 - protein, 15 aa, Blattella germanica
GIRIYVDVVLNQMSG

SEQ ID NO: 92 - protein, 15 aa, Blattella germanica
RGNNAIKWLVNFGVG

SEQ ID NO: 93 - protein, 15 aa, Blattella germanica
GASILTYKTSKLYKM

SEQ ID NO: 94 - protein, 15 aa, Blattella germanica
KLYKMAVAFMLAYPY

SEQ ID NO: 95 - protein, 15 aa, Blattella germanica
WVCEHRWRQIFNMVG

SEQ ID NO: 96 - protein, 15 aa, Blattella germanica
RWRQIFNMVGFRNAV

SEQ ID NO: 97 - protein, 15 aa, Blattella germanica
LTVFDSTSCNVVVAS

SEQ ID NO: 98 - protein, 15 aa, Blattella germanica
STSCNVVVASQECVG

SEQ ID NO: 99 - protein, 15 aa, Blattella germanica
GRGIEDSLTISNLTT

SEQ ID NO: 100 - protein, 15 aa, Blattella germanica
SQQDIVLADELSQEV

SEQ ID NO: 101 - protein, 15 aa, Blattella germanica
AVLALCATDTLANED

SEQ ID NO: 102 - protein, 15 aa, Blattella germanica
CATDTLANEDCFRHE

SEQ ID NO: 103 - protein, 15 aa, Blattella germanica
LANEDCFRHESLVPN

SEQ ID NO: 104 - protein, 15 aa, Blattella germanica
PYSVLATDYENYAIV

SEQ ID NO: 105 - protein, 15 aa, Blattella germanica
VNQHKKAIEEDLKHF

SEQ ID NO: 106 - protein, 15 aa, Blattella germanica
KHFNLKYEDLHSTCH

SEQ ID NO: 107 - protein, 15 aa, Blattella germanica
MAPSYKLTYCPVKAL

SEQ ID NO: 108 - protein, 15 aa, Blattella germanica
KLTYCPVKALGEPIR

SEQ ID NO: 109 - protein, 15 aa, Blattella germanica
FLLSYGEKDFEDYRF

SEQ ID NO: 110 - protein, 15 aa, Blattella germanica
GEKDFEDYRFQEGDW

SEQ ID NO: 111 - protein, 15 aa, Blattella germanica
PNLKPSMPFGKTPVL

SEQ ID NO: 112 - protein, 15 aa, Blattella germanica
QTHQSVAISRYLGKQ

SEQ ID NO: 113 - protein, 15 aa, Blattella germanica
VAISRYLGKQFGLSG

SEQ ID NO: 114 - protein, 15 aa, Blattella germanica
YLGKQFGLSGKDDWE

SEQ ID NO: 115 - protein, 15 aa, Blattella germanica
KDDWENLEIDMIVDT

SEQ ID NO: 116 - protein, 15 aa, Blattella germanica
NLEIDMIVDTISDFR

SEQ ID NO: 117 - protein, 15 aa, Blattella germanica
MIVDTISDFRAAIAN

SEQ ID NO: 118 - protein, 15 aa, Blattella germanica
ISDFRAAIANYHYDA

SEQ ID NO: 119 - protein, 15 aa, Blattella germanica
AAIANYHYDADENSK

SEQ ID NO: 120 - protein, 15 aa, Blattella germanica
YHYDADENSKQKKWD

SEQ ID NO: 121 - protein, 15 aa, Blattella germanica
EVVKANGGYLAAGKL

SEQ ID NO: 122 - protein, 15 aa, Blattella germanica
NGGYLAAGKLTWADF

SEQ ID NO: 123 - protein, 15 aa, Blattella germanica
AAGKLTWADFYFVAI

SEQ ID NO: 124 - protein, 15 aa, Blattella germanica
HMAKEDLVANQPNLK

SEQ ID NO: 125 - protein, 15 aa, Blattella germanica
DLVANQPNLKALREK

SEQ ID NO: 126 - protein, 15 aa, Blattella germanica
AAKFIIEEDSEAMEK

SEQ ID NO: 127 - protein, 15 aa, Blattella germanica
IEEDSEAMEKELREA

SEQ ID NO: 128 - protein, 15 aa, Blattella germanica
EAMEKELREAFRLYD

SEQ ID NO: 129 - protein, 15 aa, Blattella germanica
ELREAFRLYDKEGNG

SEQ ID NO: 130 - protein, 15 aa, Blattella germanica
FRLYDKEGNGYIPTS

SEQ ID NO: 131 - protein, 15 aa, Blattella germanica
KEGNGYIPTSCLREI

SEQ ID NO: 132 - protein, 15 aa, Blattella germanica
YIPTSCLREILRELD

SEQ ID NO: 133 - protein, 15 aa, Blattella germanica
DELDMMIEEIDADGS

SEQ ID NO: 134 - protein, 15 aa, Blattella germanica
KALQNAESEVAALNR

SEQ ID NO: 135 - protein, 15 aa, Blattella germanica
RSEERLATATAKLAE

SEQ ID NO: 136 - protein, 15 aa, Blattella germanica
VQKLQKEVDRLEDEL

SEQ ID NO: 137 - protein, 15 aa, Blattella germanica
KEVDRLEDELVHEKE

SEQ ID NO: 138 - protein, 15 aa, Blattella germanica
EAGFAKLAASDSKSL

SEQ ID NO: 139 - protein, 15 aa, Blattella germanica
KLAASDSKSLLRKYL

SEQ ID NO: 140 - protein, 15 aa, Blattella germanica
RCGRSMQGYPFNPCL

SEQ ID NO: 141 - protein, 15 aa, Blattella germanica
LIDDHFLFKEGDRFL

SEQ ID NO: 142 - protein, 15 aa, Blattella germanica
FLFKEGDRFLQHANA

SEQ ID NO: 143 - protein, 15 aa, Blattella germanica
WCNEEDHLRIISMQM

SEQ ID NO: 144 - protein, 15 aa, Blattella germanica
QVYRRLVTAVNDIEK

SEQ ID NO: 145 - protein, 15 aa, Blattella germanica
RVPFSHDDRLGFLTF

SEQ ID NO: 146 - protein, 15 aa, Blattella germanica
HDDRLGFLTFCPTNL

SEQ ID NO: 147 - protein, 15 aa, Blattella germanica
CPTNLGTTVRASVRI

SEQ ID NO: 148 - protein, 15 aa, Blattella germanica
SPYFVTNTEKMITEF

SEQ ID NO: 149 - protein, 15 aa, Blattella germanica
KIGEYKNMIAEGIID

SEQ ID NO: 150 - protein, 15 aa, Blattella germanica
RHNSAYKLHFNAFEY

SEQ ID NO: 151 - protein, 15 aa, Blattella germanica
STSLVKAHSMRNSAS

SEQ ID NO: 152 - protein, 15 aa, Blattella germanica
AVRLSKDIAADLQGE

SEQ ID NO: 153 - protein, 15 aa, Blattella germanica
LVRLLKQLKVSQIME

SEQ ID NO: 154 - protein, 15 aa, Blattella germanica
KQLKVSQIMEAARKL

SEQ ID NO: 155 - protein, 15 aa, Blattella germanica
QQFISSEMVEPKEAS

SEQ ID NO: 156 - protein, 15 aa, Blattella germanica
KNMTYVNTSLVLAFS

SEQ ID NO: 157 - protein, 15 aa, Blattella germanica
QKGYMVSSMTDLWEA

SEQ ID NO: 158 - protein, 15 aa, Blattella germanica
NTTFSNASAVIQEFL

SEQ ID NO: 159 - protein, 15 aa, Blattella germanica
PAYFKMNSPSLWKYN

SEQ ID NO: 160 - protein, 15 aa, Blattella germanica
MNITGSINLMFSQMY

SEQ ID NO: 161 - protein, 15 aa, Blattella germanica
SINLMFSQMYHAQLA

SEQ ID NO: 162 - protein, 15 aa, Blattella germanica
FSQMYHAQLAFSTAF

SEQ ID NO: 163 - protein, 15 aa, Blattella germanica
FQINLDFKNHNGFIR

SEQ ID NO: 164 - protein, 15 aa, Blattella germanica
DVLQWQTIPYTTIHN

SEQ ID NO: 165 - protein, 15 aa, Blattella germanica
VPIMNIYSAFEFDPN

SEQ ID NO: 166 - protein, 15 aa, Blattella germanica
LRLSEHLDYVKNLTV

SEQ ID NO: 167 - protein, 15 aa, Blattella germanica
AKRFAKWALPLYNKP

SEQ ID NO: 168 - protein, 15 aa, Blattella germanica
HIVFPSYEIEMFYDG

SEQ ID NO: 169 - protein, 15 aa, Blattella germanica
SYEIEMFYDGSRIMI

SEQ ID NO: 170 - protein, 15 aa, Blattella germanica
RILLRLHRCFQVLGR

SEQ ID NO: 171 - protein, 15 aa, Blattella germanica
IRHAILAAGDLYSRR

SEQ ID NO: 172 - protein, 15 aa, Blattella germanica
QSYETKLLFDLFYYA

SEQ ID NO: 173 - protein, 15 aa, Blattella germanica
KLLFDLFYYANDYDT

SEQ ID NO: 174 - protein, 15 aa, Blattella germanica
HINEGQFLYALSSAL

SEQ ID NO: 175 - protein, 15 aa, Blattella germanica
QFLYALSSALFQRED

SEQ ID NO: 176 - protein, 15 aa, Blattella germanica
LNDYILPAPYEIYPW

SEQ ID NO: 177 - protein, 15 aa, Blattella germanica
EIYPWLFVDSDVIQR

SEQ ID NO: 178 - protein, 15 aa, Blattella germanica
LNTYYSYYYFNYPTF

SEQ ID NO: 179 - protein, 15 aa, Blattella germanica
SYYYFNYPTFFNSTE

SEQ ID NO: 180 - protein, 15 aa, Blattella germanica
DRRGEMFYYTRQQLY

SEQ ID NO: 181 - protein, 15 aa, Blattella germanica
MFYYTRQQLYARYFL

SEQ ID NO: 182 - protein, 15 aa, Blattella germanica
RQQLYARYFLERLSN

SEQ ID NO: 183 - protein, 15 aa, Blattella germanica
ARYFLERLSNDLPDV

SEQ ID NO: 184 - protein, 15 aa, Blattella germanica
QATDAYVRVFLGPKY

SEQ ID NO: 185 - protein, 15 aa, Blattella germanica
KELVEKYGKGKAIFI

SEQ ID NO: 186 - protein, 15 aa, Blattella germanica
EDAFKKAYNAFKSLD

SEQ ID NO: 187 - protein, 15 aa, Blattella germanica
AKGMMHMIKKGANGS

SEQ ID NO: 188 - protein, 15 aa, Blattella germanica
VYEVAIPDRLTLRVE

SEQ ID NO: 189 - protein, 15 aa, Blattella germanica
QTLFLLLLLLAAVSA

SEQ ID NO: 190 - protein, 15 aa, Blattella germanica
SLLLNGGCKVSNYDE

SEQ ID NO: 191 - protein, 15 aa, Blattella germanica
EVKIVATLKALQNAH

SEQ ID NO: 192 - protein, 15 aa, Blattella germanica
ISLEVLKNYQLDSEL

SEQ ID NO: 193 - protein, 15 aa, Blattella germanica
LKNYQLDSELRIKAF

SEQ ID NO: 194 - protein, 15 aa, Blattella germanica
QVGSFIVSYLRNLRA

SEQ ID NO: 195 - protein, 15 aa, Blattella germanica
THQFNVAGSVTVDKT

SEQ ID NO: 196 - protein, 15 aa, Blattella germanica
LNQEAHYQFDSIHKF

SEQ ID NO: 197 - protein, 15 aa, Blattella germanica
HYQFDSIHKFEFASK

SEQ ID NO: 198 - protein, 15 aa, Blattella germanica
KAAVHLLVAVKASKE

SEQ ID NO: 199 - protein, 15 aa, Blattella germanica
WVPSKKCHLTNIACL

SEQ ID NO: 200 - protein, 15 aa, Blattella germanica
KCHLTNIACLLHNKY

SEQ ID NO: 201 - protein, 15 aa, Blattella germanica
DVLDIGGLKVQKQTF

SEQ ID NO: 202 - protein, 15 aa, Blattella germanica
DRKMYWQFKMDKIQI

SEQ ID NO: 203 - protein, 15 aa, Blattella germanica
GHSHFVSDVVLSSDG

SEQ ID NO: 204 - protein, 15 aa, Blattella germanica
DCGVAGFRVDAAKHM

SEQ ID NO: 205 - protein, 15 aa, Blattella germanica
LDYERFRGSWIIAAG

SEQ ID NO: 206 - protein, 15 aa, Blattella germanica
KNRTTIRGRTKFEGN

SEQ ID NO: 207 - protein, 15 aa, Blattella germanica
IRGRTKFEGNKFTID

SEQ ID NO: 208 - protein, 15 aa, Blattella germanica
KFEGNKFTIDYNDKG

SEQ ID NO: 209 - protein, 15 aa, Blattella germanica
ATDYENYAIVEGCPA

SEQ ID NO: 210 - protein, 15 aa, Blattella germanica
NYAIVEGCPAAANGH

SEQ ID NO: 211 - protein, 15 aa, Blattella germanica
VIYVQIRFSVRRFHP

SEQ ID NO: 212 - protein, 15 aa, Blattella germanica
IRFSVRRFHPKLGDK

SEQ ID NO: 213 - protein, 15 aa, Blattella germanica
KLGDKEMIQHYTLDQ

SEQ ID NO: 214 - protein, 15 aa, Blattella germanica
KAIEEDLKHFNLKYE

SEQ ID NO: 215 - protein, 15 aa, Blattella germanica
KTPVLEIDGKQTHQS

SEQ ID NO: 216 - protein, 15 aa, Blattella germanica
DENSKQKKWDPLKKE

SEQ ID NO: 217 - protein, 15 aa, Blattella germanica
QKKWDPLKKETIPYY

SEQ ID NO: 218 - protein, 15 aa, Blattella germanica
PLKKETIPYYTKKFD

SEQ ID NO: 219 - protein, 15 aa, Blattella germanica
TIPYYTKKFDEVVKA

SEQ ID NO: 220 - protein, 15 aa, Blattella germanica
TKKFDEVVKANGGYL

SEQ ID NO: 221 - protein, 15 aa, Blattella germanica
YFVAILDYLNHMAKE

SEQ ID NO: 222 - protein, 15 aa, Blattella germanica
QPNLKALREKVLGLP

SEQ ID NO: 223 - protein, 15 aa, Blattella germanica
ALREKVLGLPAIKAW

SEQ ID NO: 224 - protein, 15 aa, Blattella germanica
VLGLPAIKAWVAKRP

SEQ ID NO: 225 - protein, 15 aa, Blattella germanica
VLEKLEAGFAKLAAS

SEQ ID NO: 226 - protein, 15 aa, Blattella germanica
FGSTLLDVIQSGLEN

SEQ ID NO: 227 - protein, 15 aa, Blattella germanica
NDIEKRVPFSHDDRL

SEQ ID NO: 228 - protein, 15 aa, Blattella germanica
ALNSIQQFISSEMVE

SEQ ID NO: 229 - protein, 15 aa, Blattella germanica
VEALFLLMKADPSIH

SEQ ID NO: 230 - protein, 15 aa, Blattella germanica
DPSIHVLKMVAELTH

SEQ ID NO: 231 - protein, 15 aa, Blattella germanica
PKSMLLNIFTNNLGR

SEQ ID NO: 232 - protein, 15 aa, Blattella germanica
LNIFTNNLGRINTHV

SEQ ID NO: 233 - protein, 15 aa, Blattella germanica
KTLVKFVEGNLKYFN

SEQ ID NO: 234 - protein, 15 aa, Blattella germanica
LKYFNMGVQKFWAFD

SEQ ID NO: 235 - protein, 15 aa, Blattella germanica
MGVQKFWAFDNTTFS

SEQ ID NO: 236 - protein, 15 aa, Blattella germanica
NASAVIQEFLKTYKK

SEQ ID NO: 237 - protein, 15 aa, Blattella germanica
HTKLSSSSSITLTLP

SEQ ID NO: 238 - protein, 15 aa, Blattella germanica
SVNATVVRLQSWQSE

SEQ ID NO: 239 - protein, 15 aa, Blattella germanica
VVRLQSWQSEMLRMN

SEQ ID NO: 240 - protein, 15 aa, Blattella germanica
PRHGEQFYYFYQQIY

SEQ ID NO: 241 - protein, 15 aa, Blattella germanica
DYQSYRTLMRKVYDA

SEQ ID NO: 242 - protein, 15 aa, Blattella germanica
GQEYTFYVIVTPYAK

SEQ ID NO: 243 - protein, 15 aa, Blattella germanica
KAIFIKCDVTNIPEF

SEQ ID NO: 244 - protein, 15 aa, Blattella germanica
IVINNAGILNDEKWE

SEQ ID NO: 245 - protein, 15 aa, Blattella germanica
KEFANVVRVVRHTSK

SEQ ID NO: 246 - protein, 15 aa, Blattella germanica
RIKAFLALVECPCNK

SEQ ID NO: 247 - protein, 15 aa, Blattella germanica
FRKFSNNFEFSYLLG

SEQ ID NO: 248 - protein, 15 aa, Blattella germanica
NVIYSQNSFLPRATT

SEQ ID NO: 249 - protein, 15 aa, Blattella germanica
RLFGAEVGWLALHHN

SEQ ID NO: 250 - protein, 15 aa, Blattella germanica
LVYPTSLGFPLKLVL

SEQ ID NO: 251 - protein, 15 aa, Blattella germanica
SHVHFRFVPSAAVEF

SEQ ID NO: 252 - protein, 15 aa, Blattella germanica
KKLQFTYSESLDLDD

SEQ ID NO: 253 - protein, 15 aa, Blattella germanica
AQIQVVIHLDEQYIY

SEQ ID NO: 254 - protein, 15 aa, Blattella germanica
GVTPVFYNMVKQGLV

SEQ ID NO: 255 - protein, 15 aa, Blattella germanica
SEVTALNRQIGGTPI

SEQ ID NO: 256 - protein, 15 aa, Blattella germanica
GKDYILRVSQLGHTV

SEQ ID NO: 257 - protein, 15 aa, Blattella germanica
NAIEFLNNIHDLLGI

SEQ ID NO: 258 - protein, 15 aa, Blattella germanica
LNNIHDLLGIPHIPV

SEQ ID NO: 259 - protein, 15 aa, Blattella germanica
DLLGIPHIPVTARKH

SEQ ID NO: 260 - protein, 15 aa, Blattella germanica
PHIPVTARKHHRRGV

SEQ ID NO: 261 - protein, 15 aa, Blattella germanica
TARKHHRRGVGITGL

SEQ ID NO: 262 - protein, 15 aa, Blattella germanica
HRRGVGITGLIDDII

SEQ ID NO: 263 - protein, 15 aa, Blattella germanica
GITGLIDDIIAILPV

SEQ ID NO: 264 - protein, 15 aa, Blattella germanica
IDDIIAILPVDDLYA

SEQ ID NO: 265 - protein, 15 aa, Blattella germanica
AILPVDDLYALFQEK

SEQ ID NO: 266 - protein, 15 aa, Blattella germanica
DDLYALFQEKLETSP

SEQ ID NO: 267 - protein, 15 aa, Blattella germanica
LFQEKLETSPEFKAL

SEQ ID NO: 268 - protein, 15 aa, Blattella germanica
LETSPEFKALYDAIR

SEQ ID NO: 269 - protein, 15 aa, Blattella germanica
EFKALYDAIRSPEFQ

SEQ ID NO: 270 - protein, 15 aa, Blattella germanica
YDAIRSPEFQSIVGT

SEQ ID NO: 271 - protein, 15 aa, Blattella germanica
SPEFQSIVGTLEAMP

SEQ ID NO: 272 - protein, 15 aa, Blattella germanica
SIVGTLEAMPEYQNL

SEQ ID NO: 273 - protein, 15 aa, Blattella germanica
LEAMPEYQNLIQKLK

SEQ ID NO: 274 - protein, 15 aa, Blattella germanica
EYQNLIQKLKDKGVD

SEQ ID NO: 275 - protein, 15 aa, Blattella germanica
IQKLKDKGVDVDHII

SEQ ID NO: 276 - protein, 15 aa, Blattella germanica
DKGVDVDHIIELIHQ

SEQ ID NO: 277 - protein, 15 aa, Blattella germanica
VDHIIELIHQIFNIV

SEQ ID NO: 278 - protein, 15 aa, Blattella germanica
ELIHQIFNIVRDTRG

SEQ ID NO: 279 - protein, 15 aa, Blattella germanica
IFNIVRDTRGLPEDL

SEQ ID NO: 280 - protein, 15 aa, Blattella germanica
RDTRGLPEDLQDFLA

SEQ ID NO: 281 - protein, 15 aa, Blattella germanica
DTRGLPEDLQDFLAL

SEQ ID NO: 282 - protein, 15 aa, Blattella germanica
LPEDLQDFLALIPTD

SEQ ID NO: 283 - protein, 15 aa, Blattella germanica
QDFLALIPTDQVLAI

SEQ ID NO: 284 - protein, 15 aa, Blattella germanica
LIPTDQVLAIAADYL

SEQ ID NO: 285 - protein, 15 aa, Blattella germanica
QVLAIAADYLANDAE

SEQ ID NO: 286 - protein, 15 aa, Blattella germanica
AADYLANDAEVKAAV

SEQ ID NO: 287 - protein, 15 aa, Blattella germanica
ANDAEVKAAVEYLKS

SEQ ID NO: 288 - protein, 15 aa, Blattella germanica
VKAAVEYLKSDEFET

SEQ ID NO: 289 - protein, 15 aa, Blattella germanica
EYLKSDEFETIVVTV

SEQ ID NO: 290 - protein, 15 aa, Blattella germanica
DEFETIVVTVDSLPE

SEQ ID NO: 291 - protein, 15 aa, Blattella germanica
IVVTVDSLPEFKNFL

SEQ ID NO: 292 - protein, 15 aa, Blattella germanica
DSLPEFKNFLNFLQT

SEQ ID NO: 293 - protein, 15 aa, Blattella germanica
FKNFLNFLQTNGLNA

SEQ ID NO: 294 - protein, 15 aa, Blattella germanica
NFLQTNGLNAIEFLN

SEQ ID NO: 295 - protein, 15 aa, Blattella germanica
NGLNAIEFLNNIHDL

SEQ ID NO: 296 - protein, 15 aa, Blattella germanica
IEFLNNIHDLLGIPH

SEQ ID NO: 297 - protein, 15 aa, Blattella germanica
NIHDLLGIPHIPVTG

SEQ ID NO: 298 - protein, 15 aa, Blattella germanica
LGIPHIPVTGRKHLR

SEQ ID NO: 299 - protein, 15 aa, Blattella germanica
IPVTGRKHLRRGVGI

SEQ ID NO: 300 - protein, 15 aa, Blattella germanica
RKHLRRGVGITGLID

SEQ ID NO: 301 - protein, 15 aa, Blattella germanica
HLRRGVGITGLIDDI

SEQ ID NO: 302 - protein, 15 aa, Blattella germanica
RGVGITGLIDDIIAI

SEQ ID NO: 303 - protein, 15 aa, Blattella germanica
TGLIDDIIAILPVDD

SEQ ID NO: 304 - protein, 15 aa, Blattella germanica
DIIAILPVDDLYALF

SEQ ID NO: 305 - protein, 15 aa, Blattella germanica
LPVDDLYALFQEKLE

SEQ ID NO: 306 - protein, 15 aa, Blattella germanica
LYALFQEKLETSPEF

SEQ ID NO: 307 - protein, 15 aa, Blattella germanica
QEKLETSPEFKALYD

SEQ ID NO: 308 - protein, 15 aa, Blattella germanica
TSPEFKALYDAIRSP

SEQ ID NO: 309 - protein, 15 aa, Blattella germanica
KALYDAIRSPEFQSI

SEQ ID NO: 310 - protein, 15 aa, Blattella germanica
AIRSPEFQSIVETLK

SEQ ID NO: 311 - protein, 15 aa, Blattella germanica
EFQSIVETLKAMPEY

SEQ ID NO: 312 - protein, 15 aa, Blattella germanica
VETLKAMPEYQSLIQ

SEQ ID NO: 313 - protein, 15 aa, Blattella germanica
AMPEYQSLIQKLKDK

SEQ ID NO: 314 - protein, 15 aa, Blattella germanica
QSLIQKLKDKGVDVD

SEQ ID NO: 315 - protein, 15 aa, Blattella germanica
KLKDKGVDVDHIIEL

SEQ ID NO: 316 - protein, 15 aa, Blattella germanica
GVDVDHIIELIHQIF

SEQ ID NO: 317 - protein, 15 aa, Blattella germanica
HIIELIHQIFNIVRD

SEQ ID NO: 318 - protein, 15 aa, Blattella germanica
IHQIFNIVRDTRGLP

SEQ ID NO: 319 - protein, 15 aa, Blattella germanica
NIVRDTRGLPEDLQD

SEQ ID NO: 320 - protein, 15 aa, Blattella germanica
DTRGLPEDLQDFLAL

SEQ ID NO: 321 - protein, 15 aa, Blattella germanica
TRGLPEDLQDFLALI

SEQ ID NO: 322 - protein, 15 aa, Blattella germanica
EDLQDFLALIPIDQI

SEQ ID NO: 323 - protein, 15 aa, Blattella germanica
FLALIPIDQILAIAA

SEQ ID NO: 324 - protein, 15 aa, Blattella germanica
PIDQILAIAADYLAN

SEQ ID NO: 325 - protein, 15 aa, Blattella germanica
LAIAADYLANDAEVQ

SEQ ID NO: 326 - protein, 15 aa, Blattella germanica
DYLANDAEVQAAVEY

SEQ ID NO: 327 - protein, 15 aa, Blattella germanica
DAEVQAAVEYLKSDE

SEQ ID NO: 328 - protein, 15 aa, Blattella germanica
AAVEYLKSDEFETIV

SEQ ID NO: 329 - protein, 15 aa, Blattella germanica
LKSDEFETIVVTVDS

SEQ ID NO: 330 - protein, 15 aa, Blattella germanica
FETIVVTVDSLPEFK

SEQ ID NO: 331 - protein, 15 aa, Blattella germanica
VTVDSLPEFKNFLNF

SEQ ID NO: 332 - protein, 15 aa, Blattella germanica
LPEFKNFLNFLQTNG

SEQ ID NO: 333 - protein, 15 aa, Blattella germanica
NFLNFLQTNGLNAIE

SEQ ID NO: 334 - protein, 15 aa, Blattella germanica
LQTNGLNAIEFINNI

SEQ ID NO: 335 - protein, 15 aa, Blattella germanica
LNAIEFINNIHDLLG

SEQ ID NO: 336 - protein, 15 aa, Blattella germanica
FINNIHDLLGIPHIP

SEQ ID NO: 337 - protein, 15 aa, Blattella germanica
HDLLGIPHIPATGRK

SEQ ID NO: 338 - protein, 15 aa, Blattella germanica
IPHIPATGRKHVRRG

SEQ ID NO: 339 - protein, 15 aa, Blattella germanica
ATGRKHVRRGVGING

SEQ ID NO: 340 - protein, 15 aa, Blattella germanica
HVRRGVGINGLIDDV

SEQ ID NO: 341 - protein, 15 aa, Blattella germanica
VGINGLIDDVIAILP

SEQ ID NO: 342 - protein, 15 aa, Blattella germanica
LIDDVIAILPVDELY

SEQ ID NO: 343 - protein, 15 aa, Blattella germanica
IAILPVDELYALFQE

SEQ ID NO: 344 - protein, 15 aa, Blattella germanica
VDELYALFQEKLESS

SEQ ID NO: 345 - protein, 15 aa, Blattella germanica
ALFQEKLESSPEFKA

SEQ ID NO: 346 - protein, 15 aa, Blattella germanica
KLESSPEFKALYDAI

SEQ ID NO: 347 - protein, 15 aa, Blattella germanica
PEFKALYDAIRSPEF

SEQ ID NO: 348 - protein, 15 aa, Blattella germanica
LYDAIRSPEFQSIVQ

SEQ ID NO: 349 - protein, 15 aa, Blattella germanica
RSPEFQSIVQTLKAM

SEQ ID NO: 350 - protein, 15 aa, Blattella germanica
QSIVQTLKAMPEYQD

SEQ ID NO: 351 - protein, 15 aa, Blattella germanica
TLKAMPEYQDLIQRL

SEQ ID NO: 352 - protein, 15 aa, Blattella germanica
PEYQDLIQRLKDKGV

SEQ ID NO: 353 - protein, 15 aa, Blattella germanica
LIQRLKDKGVDVDHF

SEQ ID NO: 354 - protein, 15 aa, Blattella germanica
KDKGVDVDHFIELIK

SEQ ID NO: 355 - protein, 15 aa, Blattella germanica
DVDHFIELIKKLFGL

SEQ ID NO: 356 - protein, 15 aa, Blattella germanica
DHFIELIKKLFGLSH

SEQ ID NO: 357 - protein, 15 aa, Blattella germanica
NLLEKLREKGVDVDK

SEQ ID NO: 358 - protein, 15 aa, Blattella germanica
LEKLREKGVDVDKII

SEQ ID NO: 359 - protein, 15 aa, Blattella germanica
EKGVDVDKIIELIRA

SEQ ID NO: 360 - protein, 15 aa, Blattella germanica
VDKIIELIRALFGLT

SEQ ID NO: 361 - protein, 15 aa, Blattella germanica
KIIELIRALFGLTLN

SEQ ID NO: 362 - protein, 15 aa, Blattella germanica
IRALFGLTLNAKASR

SEQ ID NO: 363 - protein, 15 aa, Blattella germanica
GLTLNAKASRNLQDD

SEQ ID NO: 364 - protein, 15 aa, Blattella germanica
AKASRNLQDDLQDFL

SEQ ID NO: 365 - protein, 15 aa, Blattella germanica
KASRNLQDDLQDFLA

SEQ ID NO: 366 - protein, 15 aa, Blattella germanica
ASRNLQDDLQDFLAL

SEQ ID NO: 367 - protein, 15 aa, Blattella germanica
LQDDLQDFLALIPVD

SEQ ID NO: 368 - protein, 15 aa, Blattella germanica
QDFLALIPVDQIIAI

SEQ ID NO: 369 - protein, 15 aa, Blattella germanica
LIPVDQIIAIATDYL

SEQ ID NO: 370 - protein, 15 aa, Blattella germanica
QIIAIATDYLANDAE

SEQ ID NO: 371 - protein, 15 aa, Blattella germanica
ATDYLANDAEVQAAV

SEQ ID NO: 372 - protein, 15 aa, Blattella germanica
ANDAEVQAAVAYLQS

SEQ ID NO: 373 - protein, 15 aa, Blattella germanica
VQAAVAYLQSDEFET

SEQ ID NO: 374 - protein, 15 aa, Blattella germanica
AYLQSDEFETIVVAL

SEQ ID NO: 375 - protein, 15 aa, Blattella germanica
DEFETIVVALDALPE

SEQ ID NO: 376 - protein, 15 aa, Blattella germanica
IVVALDALPELQNFL

SEQ ID NO: 377 - protein, 15 aa, Blattella germanica
DALPELQNFLNFLEA

SEQ ID NO: 378 - protein, 15 aa, Blattella germanica
LQNFLNFLEANGLNA

SEQ ID NO: 379 - protein, 15 aa, Blattella germanica
NFLEANGLNAIDFLN

SEQ ID NO: 380 - protein, 15 aa, Blattella germanica
NGLNAIDFLNGIHDL

SEQ ID NO: 381 - protein, 15 aa, Blattella germanica
IDFLNGIHDLLGIPH

SEQ ID NO: 382 - protein, 15 aa, Blattella germanica
GIHDLLGIPHIPVSG

SEQ ID NO: 383 - protein, 15 aa, Blattella germanica
DLLGIPHIPVSGRKY

SEQ ID NO: 384 - protein, 15 aa, Blattella germanica
PHIPVSGRKYHIRRG

SEQ ID NO: 385 - protein, 15 aa, Blattella germanica
SGRKYHIRRGVGITG

SEQ ID NO: 386 - protein, 15 aa, Blattella germanica
YHIRRGVGITGLIDD

SEQ ID NO: 387 - protein, 15 aa, Blattella germanica
HIRRGVGITGLIDDV

SEQ ID NO: 388 - protein, 15 aa, Blattella germanica
RGVGITGLIDDVLAI

SEQ ID NO: 389 - protein, 15 aa, Blattella germanica
TGLIDDVLAILPIED

SEQ ID NO: 390 - protein, 15 aa, Blattella germanica
DVLAILPIEDLKALF

SEQ ID NO: 391 - protein, 15 aa, Blattella germanica
LPIEDLKALFNEKLE

SEQ ID NO: 392 - protein, 15 aa, Blattella germanica
LKALFNEKLETSPDF

SEQ ID NO: 393 - protein, 15 aa, Blattella germanica
NEKLETSPDFLALYN

SEQ ID NO: 394 - protein, 15 aa, Blattella germanica
TSPDFLALYNAIRSP

SEQ ID NO: 395 - protein, 15 aa, Blattella germanica
LALYNAIRSPEFQSI

SEQ ID NO: 396 - protein, 15 aa, Blattella germanica
AIRSPEFQSIVQTLN

SEQ ID NO: 397 - protein, 15 aa, Blattella germanica
EFQSIVQTLNAMPEY

SEQ ID NO: 398 - protein, 15 aa, Blattella germanica
VQTLNAMPEYQNLLQ

SEQ ID NO: 399 - protein, 15 aa, Blattella germanica
AMPEYQNLLQKLREK

SEQ ID NO: 400 - protein, 15 aa, Blattella germanica
QNLLQKLREKGVDVD

SEQ ID NO: 401 - protein, 15 aa, Blattella germanica
KLREKGVDVDKIIEL

SEQ ID NO: 402 - protein, 15 aa, Blattella germanica
GVDVDKIIELIRALF

SEQ ID NO: 403 - protein, 15 aa, Blattella germanica
KIIELIRALFGLTLN

SEQ ID NO: 404 - protein, 15 aa, Blattella germanica
IRALFGLTLNGKASR

SEQ ID NO: 405 - protein, 15 aa, Blattella germanica
GLTLNGKASRNLQDD

SEQ ID NO: 406 - protein, 15 aa, Blattella germanica
LNGKASRNLQDDLQD

SEQ ID NO: 407 - protein, 15 aa, Blattella germanica
GKASRNLQDDLQDFL

SEQ ID NO: 408 - protein, 15 aa, Blattella germanica
KASRNLQDDLQDFLA

SEQ ID NO: 409 - protein, 15 aa, Blattella germanica
ASRNLQDDLQDFLAL

SEQ ID NO: 410 - protein, 15 aa, Blattella germanica
SRNLQDDLQDFLALI

SEQ ID NO: 411 - protein, 15 aa, Blattella germanica
DDLQDFLALIPVDQI

SEQ ID NO: 412 - protein, 15 aa, Blattella germanica
FLALIPVDQIIAIAT

SEQ ID NO: 413 - protein, 15 aa, Blattella germanica
PVDQIIAIATDYLAN

SEQ ID NO: 414 - protein, 15 aa, Blattella germanica
IAIATDYLANDAEVQ

SEQ ID NO: 415 - protein, 15 aa, Blattella germanica
DYLANDAEVQAAVAY

SEQ ID NO: 416 - protein, 15 aa, Blattella germanica
DAEVQAAVAYLQSDE

SEQ ID NO: 417 - protein, 15 aa, Blattella germanica
AAVAYLQSDEFETIV

SEQ ID NO: 418 - protein, 15 aa, Blattella germanica
LQSDEFETIVVTLDA

SEQ ID NO: 419 - protein, 15 aa, Blattella germanica
FETIVVTLDALPELQ

SEQ ID NO: 420 - protein, 15 aa, Blattella germanica
VTLDALPELQNFLNF

SEQ ID NO: 421 - protein, 15 aa, Blattella germanica
LPELQNFLNFLEANG

SEQ ID NO: 422 - protein, 15 aa, Blattella germanica
NFLNFLEANGLNAID

SEQ ID NO: 423 - protein, 15 aa, Blattella germanica
LEANGLNAIDFLNGI

SEQ ID NO: 424 - protein, 15 aa, Blattella germanica
LNAIDFLNGIHDLLG

SEQ ID NO: 425 - protein, 15 aa, Blattella germanica
FLNGIHDLLGIPHIP

SEQ ID NO: 426 - protein, 15 aa, Blattella germanica
HDLLGIPHIPVSGRK

SEQ ID NO: 427 - protein, 15 aa, Blattella germanica
IPHIPVSGRKYHIRR

SEQ ID NO: 428 - protein, 15 aa, Blattella germanica
VSGRKYHIRRGVGIT

SEQ ID NO: 429 - protein, 15 aa, Blattella germanica
HIRRGVGITGLIDDV

SEQ ID NO: 430 - protein, 15 aa, Blattella germanica
VGITGLIDDVLAILP

SEQ ID NO: 431 - protein, 15 aa, Blattella germanica
LIDDVLAILPLDDLK

SEQ ID NO: 432 - protein, 15 aa, Blattella germanica
LAILPLDDLKALFNE

SEQ ID NO: 433 - protein, 15 aa, Blattella germanica
LDDLKALFNEKLETS

SEQ ID NO: 434 - protein, 15 aa, Blattella germanica
ALFNEKLETSPDFLA

SEQ ID NO: 435 - protein, 15 aa, Blattella germanica
KLETSPDFLALYNAI

SEQ ID NO: 436 - protein, 15 aa, Blattella germanica
PDFLALYNAIKSPEF

SEQ ID NO: 437 - protein, 15 aa, Blattella germanica
LYNAIKSPEFQSIVQ

SEQ ID NO: 438 - protein, 15 aa, Blattella germanica
KSPEFQSIVQTLNAM

SEQ ID NO: 439 - protein, 15 aa, Blattella germanica
QSIVQTLNAMPEYQN

SEQ ID NO: 440 - protein, 15 aa, Blattella germanica
TLNAMPEYQNLLEKL

SEQ ID NO: 441 - protein, 15 aa, Blattella germanica
PEYQNLLEKLREKGV

SEQ ID NO: 442 - protein, 15 aa, Blattella germanica
LLEKLREKGVDVDKI

SEQ ID NO: 443 - protein, 15 aa, Blattella germanica
REKGVDVDKIIELIR

SEQ ID NO: 444 - protein, 15 aa, Blattella germanica
DVDKIIELIRALFGL

SEQ ID NO: 445 - protein, 15 aa, Blattella germanica
DKIIELIRALFGLTH

SEQ ID NO: 446 - protein, 15 aa, Blattella germanica
SQKDPHVWDGRSAIV

SEQ ID NO: 447 - protein, 15 aa, Blattella germanica
HLFEWKFADIADECE

SEQ ID NO: 448 - protein, 15 aa, Blattella germanica
KFADIADECERFLGP

SEQ ID NO: 449 - protein, 15 aa, Blattella germanica
ADECERFLGPKGFAG

SEQ ID NO: 450 - protein, 15 aa, Blattella germanica
RFLGPKGFAGVQVSP

SEQ ID NO: 451 - protein, 15 aa, Blattella germanica
VQVSPVHENVIISSP

SEQ ID NO: 452 - protein, 15 aa, Blattella germanica
IISSPFRPWWERYQL

SEQ ID NO: 453 - protein, 15 aa, Blattella germanica
VSYKLVSRSGDENAF

SEQ ID NO: 454 - protein, 15 aa, Blattella germanica
VSRSGDENAFRDMVR

SEQ ID NO: 455 - protein, 15 aa, Blattella germanica
DENAFRDMVRRCNNV

SEQ ID NO: 456 - protein, 15 aa, Blattella germanica
NQMSGSWPDAHGQGG

SEQ ID NO: 457 - protein, 15 aa, Blattella germanica
SWPDAHGQGGSTADT

SEQ ID NO: 458 - protein, 15 aa, Blattella germanica
HGQGGSTADTYNLQY

SEQ ID NO: 459 - protein, 15 aa, Blattella germanica
STADTYNLQYPAVPY

SEQ ID NO: 460 - protein, 15 aa, Blattella germanica
YNLQYPAVPYGPGDF

SEQ ID NO: 461 - protein, 15 aa, Blattella germanica
PAVPYGPGDFHSTCT

SEQ ID NO: 462 - protein, 15 aa, Blattella germanica
GPGDFHSTCTVSNYQ

SEQ ID NO: 463 - protein, 15 aa, Blattella germanica
HSTCTVSNYQDPSNV

SEQ ID NO: 464 - protein, 15 aa, Blattella germanica
VSNYQDPSNVRNCEL

SEQ ID NO: 465 - protein, 15 aa, Blattella germanica
DPSNVRNCELVGLHD

SEQ ID NO: 466 - protein, 15 aa, Blattella germanica
RNCELVGLHDLNQGS

SEQ ID NO: 467 - protein, 15 aa, Blattella germanica
VGLHDLNQGSDYVRG

SEQ ID NO: 468 - protein, 15 aa, Blattella germanica
LNHLVDCGVAGFRVD

SEQ ID NO: 469 - protein, 15 aa, Blattella germanica
AAKHMWPADLQYIYS

SEQ ID NO: 470 - protein, 15 aa, Blattella germanica
WPADLQYIYSKVNNL

SEQ ID NO: 471 - protein, 15 aa, Blattella germanica
QYIYSKVNNLNTDHG

SEQ ID NO: 472 - protein, 15 aa, Blattella germanica
KVNNLNTDHGFPSGA

SEQ ID NO: 473 - protein, 15 aa, Blattella germanica
NTDHGFPSGARPFFY

SEQ ID NO: 474 - protein, 15 aa, Blattella germanica
FPSGARPFFYQEVID

SEQ ID NO: 475 - protein, 15 aa, Blattella germanica
RPFFYQEVIDLGGEA

SEQ ID NO: 476 - protein, 15 aa, Blattella germanica
QEVIDLGGEAIHSTE

SEQ ID NO: 477 - protein, 15 aa, Blattella germanica
LGGEAIHSTEYTGFG

SEQ ID NO: 478 - protein, 15 aa, Blattella germanica
IHSTEYTGFGRVTEF

SEQ ID NO: 479 - protein, 15 aa, Blattella germanica
YTGFGRVTEFKYSRD

SEQ ID NO: 480 - protein, 15 aa, Blattella germanica
RVTEFKYSRDIGDAF

SEQ ID NO: 481 - protein, 15 aa, Blattella germanica
KYSRDIGDAFRGNNA

SEQ ID NO: 482 - protein, 15 aa, Blattella germanica
IGDAFRGNNAIKWLV

SEQ ID NO: 483 - protein, 15 aa, Blattella germanica
RGNNAIKWLVNFGVG

SEQ ID NO: 484 - protein, 15 aa, Blattella germanica
IKWLVNFGVGWGYIP

SEQ ID NO: 485 - protein, 15 aa, Blattella germanica
NFGVGWGYIPDGDAL

SEQ ID NO: 486 - protein, 15 aa, Blattella germanica
WGYIPDGDALVFVDN

SEQ ID NO: 487 - protein, 15 aa, Blattella germanica
DGDALVFVDNHDNQR

SEQ ID NO: 488 - protein, 15 aa, Blattella germanica
VFVDNHDNQRGHGAG

SEQ ID NO: 489 - protein, 15 aa, Blattella germanica
HDNQRGHGAGGASIL

SEQ ID NO: 490 - protein, 15 aa, Blattella germanica
GHGAGGASILTYKTS

SEQ ID NO: 491 - protein, 15 aa, Blattella germanica
GASILTYKTSKLYKM

SEQ ID NO: 492 - protein, 15 aa, Blattella germanica
TYKTSKLYKMAVAFM

SEQ ID NO: 493 - protein, 15 aa, Blattella germanica
KLYKMAVAFMLAYPY

SEQ ID NO: 494 - protein, 15 aa, Blattella germanica
AVAFMLAYPYGYPRV

SEQ ID NO: 495 - protein, 15 aa, Blattella germanica
LAYPYGYPRVMSSFS

SEQ ID NO: 496 - protein, 15 aa, Blattella germanica
GYPRVMSSFSFDNSD

SEQ ID NO: 497 - protein, 15 aa, Blattella germanica
MSSFSFDNSDQGPPQ

SEQ ID NO: 498 - protein, 15 aa, Blattella germanica
FDNSDQGPPQDGNGN

SEQ ID NO: 499 - protein, 15 aa, Blattella germanica
QGPPQDGNGNIISPS

SEQ ID NO: 500 - protein, 15 aa, Blattella germanica
DGNGNIISPSINADG

SEQ ID NO: 501 - protein, 15 aa, Blattella germanica
IISPSINADGTCGNG

SEQ ID NO: 502 - protein, 15 aa, Blattella germanica
INADGTCGNGWVCEH

SEQ ID NO: 503 - protein, 15 aa, Blattella germanica
TCGNGWVCEHRWRQI

SEQ ID NO: 504 - protein, 15 aa, Blattella germanica
WVCEHRWRQIFNMVG

SEQ ID NO: 505 - protein, 15 aa, Blattella germanica
RWRQIFNMVGFRNAV

SEQ ID NO: 506 - protein, 15 aa, Blattella germanica
FNMVGFRNAVAGTAV

SEQ ID NO: 507 - protein, 15 aa, Blattella germanica
FRNAVAGTAVSNWWD

SEQ ID NO: 508 - protein, 15 aa, Blattella germanica
AGTAVSNWWDNGDKQ

SEQ ID NO: 509 - protein, 15 aa, Blattella germanica
SNWWDNGDKQISFCR

SEQ ID NO: 510 - protein, 15 aa, Blattella germanica
NGDKQISFCRGNKGF

SEQ ID NO: 511 - protein, 15 aa, Blattella germanica
ISFCRGNKGFVAFND

SEQ ID NO: 512 - protein, 15 aa, Blattella germanica
GNKGFVAFNDEFNND

SEQ ID NO: 513 - protein, 15 aa, Blattella germanica
VAFNDEFNNDLKQTL

SEQ ID NO: 514 - protein, 15 aa, Blattella germanica
EFNNDLKQTLQTCLP

SEQ ID NO: 515 - protein, 15 aa, Blattella germanica
LKQTLQTCLPAGDYC

SEQ ID NO: 516 - protein, 15 aa, Blattella germanica
QTCLPAGDYCDVISG

SEQ ID NO: 517 - protein, 15 aa, Blattella germanica
AGDYCDVISGSYENG

SEQ ID NO: 518 - protein, 15 aa, Blattella germanica
DVISGSYENGSCTGK

SEQ ID NO: 519 - protein, 15 aa, Blattella germanica
SYENGSCTGKTVTVG

SEQ ID NO: 520 - protein, 15 aa, Blattella germanica
SCTGKTVTVGSDGKA

SEQ ID NO: 521 - protein, 15 aa, Blattella germanica
TVTVGSDGKAYIEIL

SEQ ID NO: 522 - protein, 15 aa, Blattella germanica
SDGKAYIEILSSADD

SEQ ID NO: 523 - protein, 15 aa, Blattella germanica
YIEILSSADDGVLAI

SEQ ID NO: 524 - protein, 15 aa, Blattella germanica
SSADDGVLAIHVNSK

SEQ ID NO: 525 - protein, 15 aa, Blattella germanica
GVLAIHVNSKVGSKS

SEQ ID NO: 526 - protein, 15 aa, Blattella germanica
HVNSKVGSKSQTTTT

SEQ ID NO: 527 - protein, 15 aa, Blattella germanica
VGSKSQTTTTQSSHC

SEQ ID NO: 528 - protein, 15 aa, Blattella germanica
KSQTTTTQSSHCTCS

SEQ ID NO: 529 - protein, 15 aa, Blattella germanica
MIGLKLVTVLFAVAT

SEQ ID NO: 530 - protein, 15 aa, Blattella germanica
LVTVLFAVATITHAA

SEQ ID NO: 531 - protein, 15 aa, Blattella germanica
FAVATITHAAELQRV

SEQ ID NO: 532 - protein, 15 aa, Blattella germanica
ITHAAELQRVPLYKL

SEQ ID NO: 533 - protein, 15 aa, Blattella germanica
ELQRVPLYKLVHVFI

SEQ ID NO: 534 - protein, 15 aa, Blattella germanica
PLYKLVHVFINTQYA

SEQ ID NO: 535 - protein, 15 aa, Blattella germanica
VHVFINTQYAGITKI

SEQ ID NO: 536 - protein, 15 aa, Blattella germanica
NTQYAGITKIGNQNF

SEQ ID NO: 537 - protein, 15 aa, Blattella germanica
GITKIGNQNFLTVFD

SEQ ID NO: 538 - protein, 15 aa, Blattella germanica
GNQNFLTVFDSTSCN

SEQ ID NO: 539 - protein, 15 aa, Blattella germanica
LTVFDSTSCNVVVAS

SEQ ID NO: 540 - protein, 15 aa, Blattella germanica
STSCNVVVASQECVG

SEQ ID NO: 541 - protein, 15 aa, Blattella germanica
VVVASQECVGGACVC

SEQ ID NO: 542 - protein, 15 aa, Blattella germanica
QECVGGACVCPNLQK

SEQ ID NO: 543 - protein, 15 aa, Blattella germanica
GACVCPNLQKYEKLK

SEQ ID NO: 544 - protein, 15 aa, Blattella germanica
PNLQKYEKLKPKYIS

SEQ ID NO: 545 - protein, 15 aa, Blattella germanica
YEKLKPKYISDGNVQ

SEQ ID NO: 546 - protein, 15 aa, Blattella germanica
PKYISDGNVQVKFFD

SEQ ID NO: 547 - protein, 15 aa, Blattella germanica
DGNVQVKFFDTGSAV

SEQ ID NO: 548 - protein, 15 aa, Blattella germanica
VKFFDTGSAVGRGIE

SEQ ID NO: 549 - protein, 15 aa, Blattella germanica
TGSAVGRGIEDSLTI

SEQ ID NO: 550 - protein, 15 aa, Blattella germanica
GRGIEDSLTISNLTT

SEQ ID NO: 551 - protein, 15 aa, Blattella germanica
DSLTISNLTTSQQDI

SEQ ID NO: 552 - protein, 15 aa, Blattella germanica
SNLTTSQQDIVLADE

SEQ ID NO: 553 - protein, 15 aa, Blattella germanica
SQQDIVLADELSQEV

SEQ ID NO: 554 - protein, 15 aa, Blattella germanica
VLADELSQEVCILSA

SEQ ID NO: 555 - protein, 15 aa, Blattella germanica
LSQEVCILSADVVVG

SEQ ID NO: 556 - protein, 15 aa, Blattella germanica
CILSADVVVGIAAPG

SEQ ID NO: 557 - protein, 15 aa, Blattella germanica
DVVVGIAAPGCPNAL

SEQ ID NO: 558 - protein, 15 aa, Blattella germanica
IAAPGCPNALKGKTV

SEQ ID NO: 559 - protein, 15 aa, Blattella germanica
CPNALKGKTVLENFV

SEQ ID NO: 560 - protein, 15 aa, Blattella germanica
KGKTVLENFVEENLI

SEQ ID NO: 561 - protein, 15 aa, Blattella germanica
LENFVEENLIAPVFS

SEQ ID NO: 562 - protein, 15 aa, Blattella germanica
EENLIAPVFSIHHAR

SEQ ID NO: 563 - protein, 15 aa, Blattella germanica
APVFSIHHARFQDGE

SEQ ID NO: 564 - protein, 15 aa, Blattella germanica
IHHARFQDGEHFGEI

SEQ ID NO: 565 - protein, 15 aa, Blattella germanica
FQDGEHFGEIIFGGS

SEQ ID NO: 566 - protein, 15 aa, Blattella germanica
HFGEIIFGGSDWKYV

SEQ ID NO: 567 - protein, 15 aa, Blattella germanica
IFGGSDWKYVDGEFT

SEQ ID NO: 568 - protein, 15 aa, Blattella germanica
DWKYVDGEFTYVPLV

SEQ ID NO: 569 - protein, 15 aa, Blattella germanica
DGEFTYVPLVGDDSW

SEQ ID NO: 570 - protein, 15 aa, Blattella germanica
YVPLVGDDSWKFRLD

SEQ ID NO: 571 - protein, 15 aa, Blattella germanica
GDDSWKFRLDGVKIG

SEQ ID NO: 572 - protein, 15 aa, Blattella germanica
KFRLDGVKIGDTTVA

SEQ ID NO: 573 - protein, 15 aa, Blattella germanica
GVKIGDTTVAPAGTQ

SEQ ID NO: 574 - protein, 15 aa, Blattella germanica
DTTVAPAGTQAIIDT

SEQ ID NO: 575 - protein, 15 aa, Blattella germanica
PAGTQAIIDTSKAII

SEQ ID NO: 576 - protein, 15 aa, Blattella germanica
AIIDTSKAIIVGPKA

SEQ ID NO: 577 - protein, 15 aa, Blattella germanica
SKAIIVGPKAYVNPI

SEQ ID NO: 578 - protein, 15 aa, Blattella germanica
VGPKAYVNPINEAIG

SEQ ID NO: 579 - protein, 15 aa, Blattella germanica
YVNPINEAIGCVVEK

SEQ ID NO: 580 - protein, 15 aa, Blattella germanica
NEAIGCVVEKTTTRR

SEQ ID NO: 581 - protein, 15 aa, Blattella germanica
CVVEKTTTRRICKLD

SEQ ID NO: 582 - protein, 15 aa, Blattella germanica
TTTRRICKLDCSKIP

SEQ ID NO: 583 - protein, 15 aa, Blattella germanica
ICKLDCSKIPSLPDV

SEQ ID NO: 584 - protein, 15 aa, Blattella germanica
CSKIPSLPDVTFVIN

SEQ ID NO: 585 - protein, 15 aa, Blattella germanica
SLPDVTFVINGRNFN

SEQ ID NO: 586 - protein, 15 aa, Blattella germanica
TFVINGRNFNISSQY

SEQ ID NO: 587 - protein, 15 aa, Blattella germanica
GRNFNISSQYYIQQN

SEQ ID NO: 588 - protein, 15 aa, Blattella germanica
ISSQYYIQQNGNLCY

SEQ ID NO: 589 - protein, 15 aa, Blattella germanica
YIQQNGNLCYSGFQP

SEQ ID NO: 590 - protein, 30 aa, Blattella germanica
GNLCYSGFQPCGHSDGNLCYSGFQPCGHSD

SEQ ID NO: 591 - protein, 15 aa, Blattella germanica
SGFQPCGHSDHFFIG

SEQ ID NO: 592 - protein, 15 aa, Blattella germanica
CGHSDHFFIGDFFVD

SEQ ID NO: 593 - protein, 15 aa, Blattella germanica
HFFIGDFFVDHYYSE

SEQ ID NO: 594 - protein, 15 aa, Blattella germanica
DFFVDHYYSEFNWEN

SEQ ID NO: 595 - protein, 15 aa, Blattella germanica
HYYSEFNWENKTMGF

SEQ ID NO: 596 - protein, 15 aa, Blattella germanica
FNWENKTMGFGRSVE

SEQ ID NO: 597 - protein, 15 aa, Blattella germanica
WENKTMGFGRSVESV

SEQ ID NO: 598 - protein, 15 aa, Blattella germanica
AVLALCATDTLANED

SEQ ID NO: 599 - protein, 15 aa, Blattella germanica
CATDTLANEDCFRHE

SEQ ID NO: 600 - protein, 15 aa, Blattella germanica
LANEDCFRHESLVPN

SEQ ID NO: 601 - protein, 15 aa, Blattella germanica
CFRHESLVPNLDYER

SEQ ID NO: 602 - protein, 15 aa, Blattella germanica
SLVPNLDYERFRGSW

SEQ ID NO: 603 - protein, 15 aa, Blattella germanica
LDYERFRGSWIIAAG

SEQ ID NO: 604 - protein, 15 aa, Blattella germanica
FRGSWIIAAGTSEAL

SEQ ID NO: 605 - protein, 15 aa, Blattella germanica
IIAAGTSEALTQYKC

SEQ ID NO: 606 - protein, 15 aa, Blattella germanica
TSEALTQYKCWIDRF

SEQ ID NO: 607 - protein, 15 aa, Blattella germanica
TQYKCWIDRFSYDDA

SEQ ID NO: 608 - protein, 15 aa, Blattella germanica
WIDRFSYDDALVSKY

SEQ ID NO: 609 - protein, 15 aa, Blattella germanica
SYDDALVSKYTDSQG

SEQ ID NO: 610 - protein, 15 aa, Blattella germanica
LVSKYTDSQGKNRTT

SEQ ID NO: 611 - protein, 15 aa, Blattella germanica
TDSQGKNRTTIRGRT

SEQ ID NO: 612 - protein, 15 aa, Blattella germanica
KNRTTIRGRTKFEGN

SEQ ID NO: 613 - protein, 15 aa, Blattella germanica
IRGRTKFEGNKFTID

SEQ ID NO: 614 - protein, 15 aa, Blattella germanica
KFEGNKFTIDYNDKG

SEQ ID NO: 615 - protein, 15 aa, Blattella germanica
KFTIDYNDKGKAFSA

SEQ ID NO: 616 - protein, 15 aa, Blattella germanica
YNDKGKAFSAPYSVL

SEQ ID NO: 617 - protein, 15 aa, Blattella germanica
KAFSAPYSVLATDYE

SEQ ID NO: 618 - protein, 15 aa, Blattella germanica
PYSVLATDYENYAIV

SEQ ID NO: 619 - protein, 15 aa, Blattella germanica
ATDYENYAIVEGCPA

SEQ ID NO: 620 - protein, 15 aa, Blattella germanica
NYAIVEGCPAAANGH

SEQ ID NO: 621 - protein, 15 aa, Blattella germanica
EGCPAAANGHVIYVQ

SEQ ID NO: 622 - protein, 15 aa, Blattella germanica
AANGHVIYVQIRFSV

SEQ ID NO: 623 - protein, 15 aa, Blattella germanica
VIYVQIRFSVRRFHP

SEQ ID NO: 624 - protein, 15 aa, Blattella germanica
IRFSVRRFHPKLGDK

SEQ ID NO: 625 - protein, 15 aa, Blattella germanica
RRFHPKLGDKEMIQH

SEQ ID NO: 626 - protein, 15 aa, Blattella germanica
KLGDKEMIQHYTLDQ

SEQ ID NO: 627 - protein, 15 aa, Blattella germanica
EMIQHYTLDQVNQHK

SEQ ID NO: 628 - protein, 15 aa, Blattella germanica
YTLDQVNQHKKAIEE

SEQ ID NO: 629 - protein, 15 aa, Blattella germanica
VNQHKKAIEEDLKHF

SEQ ID NO: 630 - protein, 15 aa, Blattella germanica
KAIEEDLKHFNLKYE

SEQ ID NO: 631 - protein, 15 aa, Blattella germanica
DLKHFNLKYEDLHST

SEQ ID NO: 632 - protein, 15 aa, Blattella germanica
KHFNLKYEDLHSTCH

SEQ ID NO: 633 - protein, 15 aa, Blattella germanica
MAPSYKLTYCPVKAL

SEQ ID NO: 634 - protein, 15 aa, Blattella germanica
KLTYCPVKALGEPIR

SEQ ID NO: 635 - protein, 15 aa, Blattella germanica
PVKALGEPIRFLLSY

SEQ ID NO: 636 - protein, 15 aa, Blattella germanica
GEPIRFLLSYGEKDF

SEQ ID NO: 637 - protein, 15 aa, Blattella germanica
FLLSYGEKDFEDYRF

SEQ ID NO: 638 - protein, 15 aa, Blattella germanica
GEKDFEDYRFQEGDW

SEQ ID NO: 639 - protein, 15 aa, Blattella germanica
EDYRFQEGDWPNLKP

SEQ ID NO: 640 - protein, 15 aa, Blattella germanica
QEGDWPNLKPSMPFG

SEQ ID NO: 641 - protein, 15 aa, Blattella germanica
PNLKPSMPFGKTPVL

SEQ ID NO: 642 - protein, 15 aa, Blattella germanica
SMPFGKTPVLEIDGK

SEQ ID NO: 643 - protein, 15 aa, Blattella germanica
KTPVLEIDGKQTHQS

SEQ ID NO: 644 - protein, 15 aa, Blattella germanica
EIDGKQTHQSVAISR

SEQ ID NO: 645 - protein, 15 aa, Blattella germanica
QTHQSVAISRYLGKQ

SEQ ID NO: 646 - protein, 15 aa, Blattella germanica
VAISRYLGKQFGLSG

SEQ ID NO: 647 - protein, 15 aa, Blattella germanica
YLGKQFGLSGKDDWE

SEQ ID NO: 648 - protein, 15 aa, Blattella germanica
FGLSGKDDWENLEID

SEQ ID NO: 649 - protein, 15 aa, Blattella germanica
KDDWENLEIDMIVDT

SEQ ID NO: 650 - protein, 15 aa, Blattella germanica
NLEIDMIVDTISDFR

SEQ ID NO: 651 - protein, 15 aa, Blattella germanica
MIVDTISDFRAAIAN

SEQ ID NO: 652 - protein, 15 aa, Blattella germanica
ISDFRAAIANYHYDA

SEQ ID NO: 653 - protein, 15 aa, Blattella germanica
AAIANYHYDADENSK

SEQ ID NO: 654 - protein, 15 aa, Blattella germanica
YHYDADENSKQKKWD

SEQ ID NO: 655 - protein, 15 aa, Blattella germanica
DENSKQKKWDPLKKE

SEQ ID NO: 656 - protein, 15 aa, Blattella germanica
QKKWDPLKKETIPYY

SEQ ID NO: 657 - protein, 15 aa, Blattella germanica
PLKKETIPYYTKKFD

SEQ ID NO: 658 - protein, 15 aa, Blattella germanica
TIPYYTKKFDEVVKA

SEQ ID NO: 659 - protein, 15 aa, Blattella germanica
TKKFDEVVKANGGYL

SEQ ID NO: 660 - protein, 15 aa, Blattella germanica
EVVKANGGYLAAGKL

SEQ ID NO: 661 - protein, 15 aa, Blattella germanica
NGGYLAAGKLTWADF

SEQ ID NO: 662 - protein, 15 aa, Blattella germanica
AAGKLTWADFYFVAI

SEQ ID NO: 663 - protein, 15 aa, Blattella germanica
TWADFYFVAILDYLN

SEQ ID NO: 664 - protein, 15 aa, Blattella germanica
YFVAILDYLNHMAKE

SEQ ID NO: 665 - protein, 15 aa, Blattella germanica
LDYLNHMAKEDLVAN

SEQ ID NO: 666 - protein, 15 aa, Blattella germanica
HMAKEDLVANQPNLK

SEQ ID NO: 667 - protein, 15 aa, Blattella germanica
DLVANQPNLKALREK

SEQ ID NO: 668 - protein, 15 aa, Blattella germanica
QPNLKALREKVLGLP

SEQ ID NO: 669 - protein, 15 aa, Blattella germanica
ALREKVLGLPAIKAW

SEQ ID NO: 670 - protein, 15 aa, Blattella germanica
VLGLPAIKAWVAKRP

SEQ ID NO: 671 - protein, 15 aa, Blattella germanica
PAIKAWVAKRPPTDL

SEQ ID NO: 672 - protein, 15 aa, Blattella germanica
MADEQLQLPPEQISV

SEQ ID NO: 673 - protein, 15 aa, Blattella germanica
LQLPPEQISVLRKAF

SEQ ID NO: 674 - protein, 15 aa, Blattella germanica
EQISVLRKAFDAFDR

SEQ ID NO: 675 - protein, 15 aa, Blattella germanica
LRKAFDAFDREKSGS

SEQ ID NO: 676 - protein, 15 aa, Blattella germanica
DAFDREKSGSISTNM

SEQ ID NO: 677 - protein, 15 aa, Blattella germanica
EKSGSISTNMVEEIL

SEQ ID NO: 678 - protein, 15 aa, Blattella germanica
ISTNMVEEILRLMGQ

SEQ ID NO: 679 - protein, 15 aa, Blattella germanica
VEEILRLMGQPFNRR

SEQ ID NO: 680 - protein, 15 aa, Blattella germanica
RLMGQPFNRRTLEEL

SEQ ID NO: 681 - protein, 15 aa, Blattella germanica
PFNRRTLEELIDEVD

SEQ ID NO: 682 - protein, 15 aa, Blattella germanica
TLEELIDEVDADKSG

SEQ ID NO: 683 - protein, 15 aa, Blattella germanica
IDEVDADKSGRLEFD

SEQ ID NO: 684 - protein, 15 aa, Blattella germanica
ADKSGRLEFDEFVTL

SEQ ID NO: 685 - protein, 15 aa, Blattella germanica
RLEFDEFVTLAAKFI

SEQ ID NO: 686 - protein, 15 aa, Blattella germanica
EFVTLAAKFIIEEDS

SEQ ID NO: 687 - protein, 15 aa, Blattella germanica
AAKFIIEEDSEAMEK

SEQ ID NO: 688 - protein, 15 aa, Blattella germanica
IEEDSEAMEKELREA

SEQ ID NO: 689 - protein, 15 aa, Blattella germanica
EAMEKELREAFRLYD

SEQ ID NO: 690 - protein, 15 aa, Blattella germanica
ELREAFRLYDKEGNG

SEQ ID NO: 691 - protein, 15 aa, Blattella germanica
FRLYDKEGNGYIPTS

SEQ ID NO: 692 - protein, 15 aa, Blattella germanica
KEGNGYIPTSCLREI

SEQ ID NO: 693 - protein, 15 aa, Blattella germanica
YIPTSCLREILRELD

SEQ ID NO: 694 - protein, 15 aa, Blattella germanica
CLREILRELDEQLTS

SEQ ID NO: 695 - protein, 15 aa, Blattella germanica
LRELDEQLTSDELDM

SEQ ID NO: 696 - protein, 15 aa, Blattella germanica
EQLTSDELDMMIEEI

SEQ ID NO: 697 - protein, 15 aa, Blattella germanica
DELDMMIEEIDADGS

SEQ ID NO: 698 - protein, 15 aa, Blattella germanica
MIEEIDADGSGTVDF

SEQ ID NO: 699 - protein, 15 aa, Blattella germanica
DADGSGTVDFDEFME

SEQ ID NO: 700 - protein, 15 aa, Blattella germanica
SGTVDFDEFMEMMTG

SEQ ID NO: 701 - protein, 15 aa, Blattella germanica
MDEIPAEQVVLLKKA

SEQ ID NO: 702 - protein, 15 aa, Blattella germanica
DEIPAEQVVLLKKAF

SEQ ID NO: 703 - protein, 15 aa, Blattella germanica
EQVVLLKKAFDAFDR

SEQ ID NO: 704 - protein, 15 aa, Blattella germanica
LKKAFDAFDREKKGC

SEQ ID NO: 705 - protein, 15 aa, Blattella germanica
DAFDREKKGCISTEM

SEQ ID NO: 706 - protein, 15 aa, Blattella germanica
EKKGCISTEMVGTIL

SEQ ID NO: 707 - protein, 15 aa, Blattella germanica
ISTEMVGTILEMLGT

SEQ ID NO: 708 - protein, 15 aa, Blattella germanica
VGTILEMLGTRLDQD

SEQ ID NO: 709 - protein, 15 aa, Blattella germanica
EMLGTRLDQDMLDEI

SEQ ID NO: 710 - protein, 15 aa, Blattella germanica
RLDQDMLDEIIAEVD

SEQ ID NO: 711 - protein, 15 aa, Blattella germanica
MLDEIIAEVDADGSG

SEQ ID NO: 712 - protein, 15 aa, Blattella germanica
IAEVDADGSGELEFE

SEQ ID NO: 713 - protein, 15 aa, Blattella germanica
ADGSGELEFEEFCTL

SEQ ID NO: 714 - protein, 15 aa, Blattella germanica
ELEFEEFCTLASRFL

SEQ ID NO: 715 - protein, 15 aa, Blattella germanica
EFCTLASRFLVEEDA

SEQ ID NO: 716 - protein, 15 aa, Blattella germanica
ASRFLVEEDAEAMQH

SEQ ID NO: 717 - protein, 15 aa, Blattella germanica
VEEDAEAMQHELREA

SEQ ID NO: 718 - protein, 15 aa, Blattella germanica
EAMQHELREAFRLYD

SEQ ID NO: 719 - protein, 15 aa, Blattella germanica
ELREAFRLYDKEGNG

SEQ ID NO: 720 - protein, 15 aa, Blattella germanica
FRLYDKEGNGYITTA

SEQ ID NO: 721 - protein, 15 aa, Blattella germanica
KEGNGYITTAVLREI

SEQ ID NO: 722 - protein, 15 aa, Blattella germanica
YITTAVLREILKELD

SEQ ID NO: 723 - protein, 15 aa, Blattella germanica
VLREILKELDDKITA

SEQ ID NO: 724 - protein, 15 aa, Blattella germanica
LKELDDKITAEDLDM

SEQ ID NO: 725 - protein, 15 aa, Blattella germanica
DKITAEDLDMMIEEI

SEQ ID NO: 726 - protein, 15 aa, Blattella germanica
EDLDMMIEEIDSDGS

SEQ ID NO: 727 - protein, 15 aa, Blattella germanica
MIEEIDSDGSGTVDF

SEQ ID NO: 728 - protein, 15 aa, Blattella germanica
DSDGSGTVDFDEFME

SEQ ID NO: 729 - protein, 15 aa, Blattella germanica
SGTVDFDEFMEVMTG

SEQ ID NO: 730 - protein, 15 aa, Blattella germanica
GTVDFDEFMEVMTGE

SEQ ID NO: 731 - protein, 15 aa, Blattella germanica
MDELPPEQIQLLKKA

SEQ ID NO: 732 - protein, 15 aa, Blattella germanica
DELPPEQIQLLKKAF

SEQ ID NO: 733 - protein, 15 aa, Blattella germanica
EQIQLLKKAFDAFDR

SEQ ID NO: 734 - protein, 15 aa, Blattella germanica
ISTEMVGTILEMLGH

SEQ ID NO: 735 - protein, 15 aa, Blattella germanica
VGTILEMLGHRLDDD

SEQ ID NO: 736 - protein, 15 aa, Blattella germanica
EMLGHRLDDDMLQEI

SEQ ID NO: 737 - protein, 15 aa, Blattella germanica
RLDDDMLQEIIAEVD

SEQ ID NO: 738 - protein, 15 aa, Blattella germanica
MLQEIIAEVDADGSG

SEQ ID NO: 739 - protein, 15 aa, Blattella germanica
ADGSGELEFEEFVSL

SEQ ID NO: 740 - protein, 15 aa, Blattella germanica
ELEFEEFVSLASRFL

SEQ ID NO: 741 - protein, 15 aa, Blattella germanica
EFVSLASRFLVEEDA

SEQ ID NO: 742 - protein, 15 aa, Blattella germanica
ASRFLVEEDAEAMQQ

SEQ ID NO: 743 - protein, 15 aa, Blattella germanica
VEEDAEAMQQELREA

SEQ ID NO: 744 - protein, 15 aa, Blattella germanica
EAMQQELREAFRLYD

SEQ ID NO: 745 - protein, 15 aa, Blattella germanica
FRLYDKEGNGYITTN

SEQ ID NO: 746 - protein, 15 aa, Blattella germanica
KEGNGYITTNVLREI

SEQ ID NO: 747 - protein, 15 aa, Blattella germanica
YITTNVLREILKELD

SEQ ID NO: 748 - protein, 15 aa, Blattella germanica
MDAIKKKMQAMKLEK

SEQ ID NO: 749 - protein, 15 aa, Blattella germanica
KKMQAMKLEKDNAMD

SEQ ID NO: 750 - protein, 15 aa, Blattella germanica
MKLEKDNAMDRALLC

SEQ ID NO: 751 - protein, 15 aa, Blattella germanica
DNAMDRALLCEQQAR

SEQ ID NO: 752 - protein, 15 aa, Blattella germanica
RALLCEQQARDANIR

SEQ ID NO: 753 - protein, 15 aa, Blattella germanica
EQQARDANIRAEKAE

SEQ ID NO: 754 - protein, 15 aa, Blattella germanica
DANIRAEKAEEEARS

SEQ ID NO: 755 - protein, 15 aa, Blattella germanica
AEKAEEEARSLQKKI

SEQ ID NO: 756 - protein, 15 aa, Blattella germanica
EEARSLQKKIQQIEN

SEQ ID NO: 757 - protein, 15 aa, Blattella germanica
LQKKIQQIENDLDQT

SEQ ID NO: 758 - protein, 15 aa, Blattella germanica
QQIENDLDQTMEQLM

SEQ ID NO: 759 - protein, 15 aa, Blattella germanica
DLDQTMEQLMQVNAK

SEQ ID NO: 760 - protein, 15 aa, Blattella germanica
MEQLMQVNAKLDEKD

SEQ ID NO: 761 - protein, 15 aa, Blattella germanica
QVNAKLDEKDKALQN

SEQ ID NO: 762 - protein, 15 aa, Blattella germanica
LDEKDKALQNAESEV

SEQ ID NO: 763 - protein, 15 aa, Blattella germanica
KALQNAESEVAALNR

SEQ ID NO: 764 - protein, 15 aa, Blattella germanica
AESEVAALNRRIQLL

SEQ ID NO: 765 - protein, 15 aa, Blattella germanica
AALNRRIQLLEEDLE

SEQ ID NO: 766 - protein, 15 aa, Blattella germanica
RIQLLEEDLERSEER

SEQ ID NO: 767 - protein, 15 aa, Blattella germanica
EEDLERSEERLATAT

SEQ ID NO: 768 - protein, 15 aa, Blattella germanica
RSEERLATATAKLAE

SEQ ID NO: 769 - protein, 15 aa, Blattella germanica
LATATAKLAEASQAA

SEQ ID NO: 770 - protein, 15 aa, Blattella germanica
AKLAEASQAADESER

SEQ ID NO: 771 - protein, 15 aa, Blattella germanica
ASQAADESERARKIL

SEQ ID NO: 772 - protein, 15 aa, Blattella germanica
DESERARKILESKGL

SEQ ID NO: 773 - protein, 15 aa, Blattella germanica
ARKILESKGLADEER

SEQ ID NO: 774 - protein, 15 aa, Blattella germanica
ESKGLADEERMDALE

SEQ ID NO: 775 - protein, 15 aa, Blattella germanica
ADEERMDALENQLKE

SEQ ID NO: 776 - protein, 15 aa, Blattella germanica
MDALENQLKEARFMA

SEQ ID NO: 777 - protein, 15 aa, Blattella germanica
NQLKEARFMAEEADK

SEQ ID NO: 778 - protein, 15 aa, Blattella germanica
ARFMAEEADKKYDEV

SEQ ID NO: 779 - protein, 15 aa, Blattella germanica
EEADKKYDEVARKLA

SEQ ID NO: 780 - protein, 15 aa, Blattella germanica
KYDEVARKLAMVEAD

SEQ ID NO: 781 - protein, 15 aa, Blattella germanica
ARKLAMVEADLERAE

SEQ ID NO: 782 - protein, 15 aa, Blattella germanica
MVEADLERAEERAET

SEQ ID NO: 783 - protein, 15 aa, Blattella germanica
LERAEERAETGESKI

SEQ ID NO: 784 - protein, 15 aa, Blattella germanica
ERAETGESKIVELEE

SEQ ID NO: 785 - protein, 15 aa, Blattella germanica
GESKIVELEEELRVV

SEQ ID NO: 786 - protein, 15 aa, Blattella germanica
VELEEELRVVGNNLK

SEQ ID NO: 787 - protein, 15 aa, Blattella germanica
ELRVVGNNLKSLEVS

SEQ ID NO: 788 - protein, 15 aa, Blattella germanica
GNNLKSLEVSEEKAN

SEQ ID NO: 789 - protein, 15 aa, Blattella germanica
SLEVSEEKANLREEE

SEQ ID NO: 790 - protein, 15 aa, Blattella germanica
EEKANLREEEYKQQI

SEQ ID NO: 791 - protein, 15 aa, Blattella germanica
LREEEYKQQIKTLNT

SEQ ID NO: 792 - protein, 15 aa, Blattella germanica
YKQQIKTLNTRLKEA

SEQ ID NO: 793 - protein, 15 aa, Blattella germanica
KTLNTRLKEAEARAE

SEQ ID NO: 794 - protein, 15 aa, Blattella germanica
RLKEAEARAEFAERS

SEQ ID NO: 795 - protein, 15 aa, Blattella germanica
EARAEFAERSVQKLQ

SEQ ID NO: 796 - protein, 15 aa, Blattella germanica
FAERSVQKLQKEVDR

SEQ ID NO: 797 - protein, 15 aa, Blattella germanica
VQKLQKEVDRLEDEL

SEQ ID NO: 798 - protein, 15 aa, Blattella germanica
KEVDRLEDELVHEKE

SEQ ID NO: 799 - protein, 15 aa, Blattella germanica
LEDELVHEKEKYKYI

SEQ ID NO: 800 - protein, 15 aa, Blattella germanica
VHEKEKYKYICDDLD

SEQ ID NO: 801 - protein, 15 aa, Blattella germanica
KYKYICDDLDMTFTE

SEQ ID NO: 802 - protein, 15 aa, Blattella germanica
ICDDLDMTFTELIGN

SEQ ID NO: 803 - protein, 15 aa, Blattella germanica
MVDAAVLEKLEAGFA

SEQ ID NO: 804 - protein, 15 aa, Blattella germanica
VLEKLEAGFAKLAAS

SEQ ID NO: 805 - protein, 15 aa, Blattella germanica
EAGFAKLAASDSKSL

SEQ ID NO: 806 - protein, 15 aa, Blattella germanica
KLAASDSKSLLRKYL

SEQ ID NO: 807 - protein, 15 aa, Blattella germanica
DSKSLLRKYLTKEVF

SEQ ID NO: 808 - protein, 15 aa, Blattella germanica
LRKYLTKEVFDNLKT

SEQ ID NO: 809 - protein, 15 aa, Blattella germanica
TKEVFDNLKTKKTPT

SEQ ID NO: 810 - protein, 15 aa, Blattella germanica
DNLKTKKTPTFGSTL

SEQ ID NO: 811 - protein, 15 aa, Blattella germanica
KKTPTFGSTLLDVIQ

SEQ ID NO: 812 - protein, 15 aa, Blattella germanica
FGSTLLDVIQSGLEN

SEQ ID NO: 813 - protein, 15 aa, Blattella germanica
LDVIQSGLENHDSGV

SEQ ID NO: 814 - protein, 15 aa, Blattella germanica
SGLENHDSGVGIYAP

SEQ ID NO: 815 - protein, 15 aa, Blattella germanica
HDSGVGIYAPDAEAY

SEQ ID NO: 816 - protein, 15 aa, Blattella germanica
GIYAPDAEAYTVFAD

SEQ ID NO: 817 - protein, 15 aa, Blattella germanica
DAEAYTVFADLFDPI

SEQ ID NO: 818 - protein, 15 aa, Blattella germanica
TVFADLFDPIIEDYH

SEQ ID NO: 819 - protein, 15 aa, Blattella germanica
LFDPIIEDYHGGFKK

SEQ ID NO: 820 - protein, 15 aa, Blattella germanica
IEDYHGGFKKTDKHP

SEQ ID NO: 821 - protein, 15 aa, Blattella germanica
GGFKKTDKHPPKDWG

SEQ ID NO: 822 - protein, 15 aa, Blattella germanica
TDKHPPKDWGDVDTL

SEQ ID NO: 823 - protein, 15 aa, Blattella germanica
PKDWGDVDTLGNLDP

SEQ ID NO: 824 - protein, 15 aa, Blattella germanica
DVDTLGNLDPAGEYI

SEQ ID NO: 825 - protein, 15 aa, Blattella germanica
GNLDPAGEYIISTRV

SEQ ID NO: 826 - protein, 15 aa, Blattella germanica
AGEYIISTRVRCGRS

SEQ ID NO: 827 - protein, 15 aa, Blattella germanica
ISTRVRCGRSMQGYP

SEQ ID NO: 828 - protein, 15 aa, Blattella germanica
RCGRSMQGYPFNPCL

SEQ ID NO: 829 - protein, 15 aa, Blattella germanica
MQGYPFNPCLTEAQY

SEQ ID NO: 830 - protein, 15 aa, Blattella germanica
FNPCLTEAQYKEMED

SEQ ID NO: 831 - protein, 15 aa, Blattella germanica
TEAQYKEMEDKVSST

SEQ ID NO: 832 - protein, 15 aa, Blattella germanica
KEMEDKVSSTLSGLE

SEQ ID NO: 833 - protein, 15 aa, Blattella germanica
KVSSTLSGLEGELKG

SEQ ID NO: 834 - protein, 15 aa, Blattella germanica
LSGLEGELKGQFYPL

SEQ ID NO: 835 - protein, 15 aa, Blattella germanica
GELKGQFYPLTGMTK

SEQ ID NO: 836 - protein, 15 aa, Blattella germanica
QFYPLTGMTKEVQQK

SEQ ID NO: 837 - protein, 15 aa, Blattella germanica
TGMTKEVQQKLIDDH

SEQ ID NO: 838 - protein, 15 aa, Blattella germanica
EVQQKLIDDHFLFKE

SEQ ID NO: 839 - protein, 15 aa, Blattella germanica
LIDDHFLFKEGDRFL

SEQ ID NO: 840 - protein, 15 aa, Blattella germanica
FLFKEGDRFLQHANA

SEQ ID NO: 841 - protein, 15 aa, Blattella germanica
GDRFLQHANACRFWP

SEQ ID NO: 842 - protein, 15 aa, Blattella germanica
QHANACRFWPTGRGI

SEQ ID NO: 843 - protein, 15 aa, Blattella germanica
CRFWPTGRGIYHNDA

SEQ ID NO: 844 - protein, 15 aa, Blattella germanica
TGRGIYHNDAKTFLV

SEQ ID NO: 845 - protein, 15 aa, Blattella germanica
YHNDAKTFLVWCNEE

SEQ ID NO: 846 - protein, 15 aa, Blattella germanica
KTFLVWCNEEDHLRI

SEQ ID NO: 847 - protein, 15 aa, Blattella germanica
WCNEEDHLRIISMQM

SEQ ID NO: 848 - protein, 15 aa, Blattella germanica
DHLRIISMQMGGDLG

SEQ ID NO: 849 - protein, 15 aa, Blattella germanica
ISMQMGGDLGQVYRR

SEQ ID NO: 850 - protein, 15 aa, Blattella germanica
GGDLGQVYRRLVTAV

SEQ ID NO: 851 - protein, 15 aa, Blattella germanica
QVYRRLVTAVNDIEK

SEQ ID NO: 852 - protein, 15 aa, Blattella germanica
LVTAVNDIEKRVPFS

SEQ ID NO: 853 - protein, 15 aa, Blattella germanica
NDIEKRVPFSHDDRL

SEQ ID NO: 854 - protein, 15 aa, Blattella germanica
RVPFSHDDRLGFLTF

SEQ ID NO: 855 - protein, 15 aa, Blattella germanica
HDDRLGFLTFCPTNL

SEQ ID NO: 856 - protein, 15 aa, Blattella germanica
GFLTFCPTNLGTTVR

SEQ ID NO: 857 - protein, 15 aa, Blattella germanica
CPTNLGTTVRASVRI

SEQ ID NO: 858 - protein, 15 aa, Blattella germanica
GTTVRASVRIKVPKL

SEQ ID NO: 859 - protein, 15 aa, Blattella germanica
ASVRIKVPKLAADKK

SEQ ID NO: 860 - protein, 15 aa, Blattella germanica
KVPKLAADKKKLEEV

SEQ ID NO: 861 - protein, 15 aa, Blattella germanica
AADKKKLEEVAGKYN

SEQ ID NO: 862 - protein, 15 aa, Blattella germanica
KLEEVAGKYNLQVRG

SEQ ID NO: 863 - protein, 15 aa, Blattella germanica
AGKYNLQVRGTRGEH

SEQ ID NO: 864 - protein, 15 aa, Blattella germanica
LQVRGTRGEHTEAEG

SEQ ID NO: 865 - protein, 15 aa, Blattella germanica
TRGEHTEAEGGVYDI

SEQ ID NO: 866 - protein, 15 aa, Blattella germanica
TEAEGGVYDISNKRR

SEQ ID NO: 867 - protein, 15 aa, Blattella germanica
GVYDISNKRRMGLTE

SEQ ID NO: 868 - protein, 15 aa, Blattella germanica
SNKRRMGLTEYDAVK

SEQ ID NO: 869 - protein, 15 aa, Blattella germanica
MGLTEYDAVKGMNDG

SEQ ID NO: 870 - protein, 15 aa, Blattella germanica
YDAVKGMNDGIAELI

SEQ ID NO: 871 - protein, 15 aa, Blattella germanica
GMNDGIAELIKIESS

SEQ ID NO: 872 - protein, 15 aa, Blattella germanica
MNDGIAELIKIESSL

SEQ ID NO: 873 - protein, 15 aa, Blattella germanica
MKLFPLVALLVLVVG

SEQ ID NO: 874 - protein, 15 aa, Blattella germanica
LFPLVALLVLVVGVL

SEQ ID NO: 875 - protein, 15 aa, Blattella germanica
ALLVLVVGVLSQKDP

SEQ ID NO: 876 - protein, 15 aa, Blattella germanica
VVGVLSQKDPHVWDG

SEQ ID NO: 877 - protein, 15 aa, Blattella germanica
HVWDGRSAIVHLFEW

SEQ ID NO: 878 - protein, 15 aa, Blattella germanica
RSAIVHLFEWKFADI

SEQ ID NO: 879 - protein, 15 aa, Blattella germanica
KGFAGVQVSPVHENV

SEQ ID NO: 880 - protein, 15 aa, Blattella germanica
VHENVIISSPFRPWW

SEQ ID NO: 881 - protein, 15 aa, Blattella germanica
FRPWWERYQLVSYKL

SEQ ID NO: 882 - protein, 15 aa, Blattella germanica
ERYQLVSYKLVSRSG

SEQ ID NO: 883 - protein, 15 aa, Blattella germanica
RDMVRRCNNVGIRIY

SEQ ID NO: 884 - protein, 15 aa, Blattella germanica
RCNNVGIRIYVDVVL

SEQ ID NO: 885 - protein, 15 aa, Blattella germanica
GIRIYVDVVLNQMSG

SEQ ID NO: 886 - protein, 15 aa, Blattella germanica
VDVVLNQMSGSWPDA

SEQ ID NO: 887 - protein, 15 aa, Blattella germanica
LNQGSDYVRGKMIEY

SEQ ID NO: 888 - protein, 15 aa, Blattella germanica
DYVRGKMIEYLNHLV

SEQ ID NO: 889 - protein, 15 aa, Blattella germanica
KMIEYLNHLVDCGVA

SEQ ID NO: 890 - protein, 15 aa, Blattella germanica
DCGVAGFRVDAAKHM

SEQ ID NO: 891 - protein, 15 aa, Blattella germanica
GFRVDAAKHMWPADL

SEQ ID NO: 892 - protein, 15 aa, Blattella germanica
MKLFPLVALLVLVVG

SEQ ID NO: 893 - protein, 15 aa, Blattella germanica
LFPLVALLVLVVGVL

SEQ ID NO: 894 - protein, 15 aa, Blattella germanica
ALLVLVVGVLSQKDP

SEQ ID NO: 895 - protein, 15 aa, Blattella germanica
VVGVLSQKDPHVWDG

SEQ ID NO: 896 - protein, 15 aa, Blattella germanica
HVWDGRSAIVHLFEW

SEQ ID NO: 897 - protein, 15 aa, Blattella germanica
RSAIVHLFEWKFADI

SEQ ID NO: 898 - protein, 15 aa, Blattella germanica
KGFAGVQVSPVHENV

SEQ ID NO: 899 - protein, 15 aa, Blattella germanica
VHENVIISSPFRPWW

SEQ ID NO: 900 - protein, 15 aa, Blattella germanica
FRPWWERYQLVSYKL

SEQ ID NO: 901 - protein, 15 aa, Blattella germanica
ERYQLVSYKLVSRSG

SEQ ID NO: 902 - protein, 15 aa, Blattella germanica
RDMVRRCNNVGIRIY

SEQ ID NO: 903 - protein, 15 aa, Blattella germanica
RCNNVGIRIYVDVVL

SEQ ID NO: 904 - protein, 15 aa, Blattella germanica
GIRIYVDVVLNQMSG

SEQ ID NO: 905 - protein, 15 aa, Blattella germanica
VDVVLNQMSGSWPDA

SEQ ID NO: 906 - protein, 15 aa, Blattella germanica
LNQGSDYVRGKMIEY

SEQ ID NO: 907 - protein, 15 aa, Blattella germanica
DYVRGKMIEYLNHLV

SEQ ID NO: 908 - protein, 15 aa, Blattella germanica
KMIEYLNHLVDCGVA

SEQ ID NO: 909 - protein, 15 aa, Blattella germanica
DCGVAGFRVDAAKHM

SEQ ID NO: 910 - protein, 15 aa, Blattella germanica
GFRVDAAKHMWPADL

SEQ ID NO: 911 - protein, 15 aa, Blattella germanica
AAKHMWPADLQYIYS

SEQ ID NO: 912 - protein, 15 aa, Blattella germanica
WPADLQYIYSKVNNL

SEQ ID NO: 913 - protein, 15 aa, Blattella germanica
QYIYSKVNNLNTDHG

SEQ ID NO: 914 - protein, 15 aa, Blattella germanica
RPFFYQEVIDLGGEA

SEQ ID NO: 915 - protein, 15 aa, Blattella germanica
IGDAFRGNNAIKWLV

SEQ ID NO: 916 - protein, 15 aa, Blattella germanica
RGNNAIKWLVNFGVG

SEQ ID NO: 917 - protein, 15 aa, Blattella germanica
IKWLVNFGVGWGYIP

SEQ ID NO: 918 - protein, 15 aa, Blattella germanica
GASILTYKTSKLYKM

SEQ ID NO: 919 - protein, 15 aa, Blattella germanica
TYKTSKLYKMAVAFM

SEQ ID NO: 920 - protein, 15 aa, Blattella germanica
KLYKMAVAFMLAYPY

SEQ ID NO: 921 - protein, 15 aa, Blattella germanica
AVAFMLAYPYGYPRV

SEQ ID NO: 922 - protein, 15 aa, Blattella germanica
GYPRVMSSFSFDNSD

SEQ ID NO: 923 - protein, 15 aa, Blattella germanica
DGNGNIISPSINADG

SEQ ID NO: 924 - protein, 15 aa, Blattella germanica
WVCEHRWRQIFNMVG

SEQ ID NO: 925 - protein, 15 aa, Blattella germanica
RWRQIFNMVGFRNAV

SEQ ID NO: 926 - protein, 15 aa, Blattella germanica
FNMVGFRNAVAGTAV

SEQ ID NO: 927 - protein, 15 aa, Blattella germanica
ISFCRGNKGFVAFND

SEQ ID NO: 928 - protein, 15 aa, Blattella germanica
EFNNDLKQTLQTCLP

SEQ ID NO: 929 - protein, 15 aa, Blattella germanica
YIEILSSADDGVLAI

SEQ ID NO: 930 - protein, 15 aa, Blattella germanica
SSADDGVLAIHVNSK

SEQ ID NO: 931 - protein, 15 aa, Blattella germanica
GVLAIHVNSKVGSKS

SEQ ID NO: 932 - protein, 15 aa, Blattella germanica
VLEKLEAGFAKLAAS

SEQ ID NO: 933 - protein, 15 aa, Blattella germanica
EAGFAKLAASDSKSL

SEQ ID NO: 934 - protein, 15 aa, Blattella germanica
KLAASDSKSLLRKYL

SEQ ID NO: 935 - protein, 15 aa, Blattella germanica
DSKSLLRKYLTKEVF

SEQ ID NO: 936 - protein, 15 aa, Blattella germanica
LRKYLTKEVFDNLKT

SEQ ID NO: 937 - protein, 15 aa, Blattella germanica
FGSTLLDVIQSGLEN

SEQ ID NO: 938 - protein, 15 aa, Blattella germanica
DAEAYTVFADLFDPI

SEQ ID NO: 939 - protein, 15 aa, Blattella germanica
AGEYIISTRVRCGRS

SEQ ID NO: 940 - protein, 15 aa, Blattella germanica
RCGRSMQGYPFNPCL

SEQ ID NO: 941 - protein, 15 aa, Blattella germanica
LIDDHFLFKEGDRFL

SEQ ID NO: 942 - protein, 15 aa, Blattella germanica
FLFKEGDRFLQHANA

SEQ ID NO: 943 - protein, 15 aa, Blattella germanica
GDRFLQHANACRFWP

SEQ ID NO: 944 - protein, 15 aa, Blattella germanica
TGRGIYHNDAKTFLV

SEQ ID NO: 945 - protein, 15 aa, Blattella germanica
WCNEEDHLRIISMQM

SEQ ID NO: 946 - protein, 15 aa, Blattella germanica
DHLRIISMQMGGDLG

SEQ ID NO: 947 - protein, 15 aa, Blattella germanica
QVYRRLVTAVNDIEK

SEQ ID NO: 948 - protein, 15 aa, Blattella germanica
NDIEKRVPFSHDDRL

SEQ ID NO: 949 - protein, 15 aa, Blattella germanica
RVPFSHDDRLGFLTF

SEQ ID NO: 950 - protein, 15 aa, Blattella germanica
HDDRLGFLTFCPTNL

SEQ ID NO: 951 - protein, 15 aa, Blattella germanica
GFLTFCPTNLGTTVR

SEQ ID NO: 952 - protein, 15 aa, Blattella germanica
CPTNLGTTVRASVRI

SEQ ID NO: 953 - protein, 15 aa, Blattella germanica
GTTVRASVRIKVPKL

SEQ ID NO: 954 - protein, 15 aa, Blattella germanica
ASVRIKVPKLAADKK

SEQ ID NO: 955 - protein, 15 aa, Blattella germanica
MPLQKLFARRIFDSR

SEQ ID NO: 956 - protein, 15 aa, Blattella germanica
LFARRIFDSRGNPTI

SEQ ID NO: 957 - protein, 15 aa, Blattella germanica
EVDLTTDLGLFRAAV

SEQ ID NO: 958 - protein, 15 aa, Blattella germanica
TDLGLFRAAVPSGAS

SEQ ID NO: 959 - protein, 15 aa, Blattella germanica
IDNVNKIIVPELLKQ

SEQ ID NO: 960 - protein, 15 aa, Blattella germanica
ELLKQSFEATQQKEI

SEQ ID NO: 961 - protein, 15 aa, Blattella germanica
DDFMLKLDGTPNKSK

SEQ ID NO: 962 - protein, 15 aa, Blattella germanica
PNKSKLGANAILGVS

SEQ ID NO: 963 - protein, 15 aa, Blattella germanica
LGANAILGVSIAVCK

SEQ ID NO: 964 - protein, 15 aa, Blattella germanica
KGVPLYRHIADLAGV

SEQ ID NO: 965 - protein, 15 aa, Blattella germanica
YRHIADLAGVPDVIL

SEQ ID NO: 966 - protein, 15 aa, Blattella germanica
GVPDVILPVPAFNVI

SEQ ID NO: 967 - protein, 15 aa, Blattella germanica
PDVILPVPAFNVING

SEQ ID NO: 968 - protein, 15 aa, Blattella germanica
QEFMILPTGAATFTE

SEQ ID NO: 969 - protein, 15 aa, Blattella germanica
SEVYHHLKNVIQGKF

SEQ ID NO: 970 - protein, 15 aa, Blattella germanica
HLKNVIQGKFGLDAT

SEQ ID NO: 971 - protein, 15 aa, Blattella germanica
IQGKFGLDATAVGDE

SEQ ID NO: 972 - protein, 15 aa, Blattella germanica
WIDKDQLTALYMEFI

SEQ ID NO: 973 - protein, 15 aa, Blattella germanica
QLTALYMEFIKEFPV

SEQ ID NO: 974 - protein, 15 aa, Blattella germanica
YMEFIKEFPVVSIED

SEQ ID NO: 975 - protein, 15 aa, Blattella germanica
HWDAWTAMTAATPIQ

SEQ ID NO: 976 - protein, 15 aa, Blattella germanica
TAMTAATPIQIVGDD

SEQ ID NO: 977 - protein, 15 aa, Blattella germanica
IVGDDLTVTNPTRIQ

SEQ ID NO: 978 - protein, 15 aa, Blattella germanica
LTVTNPTRIQTAIDK

SEQ ID NO: 979 - protein, 15 aa, Blattella germanica
KACNCLLLKVNQIGT

SEQ ID NO: 980 - protein, 15 aa, Blattella germanica
FIADLVVGLSTGQIK

SEQ ID NO: 981 - protein, 15 aa, Blattella germanica
RSERLAKYNQILRIE

SEQ ID NO: 982 - protein, 15 aa, Blattella germanica
MAKDIKFDIEARDKL

SEQ ID NO: 983 - protein, 15 aa, Blattella germanica
KKGVDALANAVKVTL

SEQ ID NO: 984 - protein, 15 aa, Blattella germanica
NVVLQKSFGGPQVTK

SEQ ID NO: 985 - protein, 15 aa, Blattella germanica
LEDPIENLGAQMVKE

SEQ ID NO: 986 - protein, 15 aa, Blattella germanica
DGTTTATVLAQAIVR

SEQ ID NO: 987 - protein, 15 aa, Blattella germanica
RALEAVIIDLRKQSR

SEQ ID NO: 988 - protein, 15 aa, Blattella germanica
VIIDLRKQSREVGGN

SEQ ID NO: 989 - protein, 15 aa, Blattella germanica
TEKIKQVASISANND

SEQ ID NO: 990 - protein, 15 aa, Blattella germanica
EGMQFDRGYQSPYFV

SEQ ID NO: 991 - protein, 15 aa, Blattella germanica
SPYFVTNTEKMITEF

SEQ ID NO: 992 - protein, 15 aa, Blattella germanica
DQPQILLSDKKIAAM

SEQ ID NO: 993 - protein, 15 aa, Blattella germanica
LLSDKKIAAMKDLLP

SEQ ID NO: 994 - protein, 15 aa, Blattella germanica
KIAAMKDLLPILEPV

SEQ ID NO: 995 - protein, 15 aa, Blattella germanica
KDLLPILEPVAQSGK

SEQ ID NO: 996 - protein, 15 aa, Blattella germanica
ILEPVAQSGKPLLII

SEQ ID NO: 997 - protein, 15 aa, Blattella germanica
GEALATLVVNKIRGT

SEQ ID NO: 998 - protein, 15 aa, Blattella germanica
TLVVNKIRGTLKVAA

SEQ ID NO: 999 - protein, 15 aa, Blattella germanica
KIRGTLKVAAIKAPG

SEQ ID NO: 1000 - protein, 15 aa, Blattella germanica
LKVAAIKAPGFGDRR

SEQ ID NO: 1001 - protein, 15 aa, Blattella germanica
KAMLEDIAILTGGSV

SEQ ID NO: 1002 - protein, 15 aa, Blattella germanica
DIAILTGGSVISEET

SEQ ID NO: 1003 - protein, 15 aa, Blattella germanica
GSKLEDVKLNMLGKA

SEQ ID NO: 1004 - protein, 15 aa, Blattella germanica
DVKLNMLGKAERVII

SEQ ID NO: 1005 - protein, 15 aa, Blattella germanica
QERLAKLAGGVAVLY

SEQ ID NO: 1006 - protein, 15 aa, Blattella germanica
VAVLYVGAASEVEMK

SEQ ID NO: 1007 - protein, 15 aa, Blattella germanica
VDDALNATRAAVEEG

SEQ ID NO: 1008 - protein, 15 aa, Blattella germanica
IVAGGGVALVRAINS

SEQ ID NO: 1009 - protein, 15 aa, Blattella germanica
GVALVRAINSLDNLR

SEQ ID NO: 1010 - protein, 15 aa, Blattella germanica
RAINSLDNLRGENAD

SEQ ID NO: 1011 - protein, 15 aa, Blattella germanica
QDTGIQIVRRSLEEP

SEQ ID NO: 1012 - protein, 15 aa, Blattella germanica
KIGEYKNMIAEGIID

SEQ ID NO: 1013 - protein, 15 aa, Blattella germanica
EGIIDPTKVARVALE

SEQ ID NO: 1014 - protein, 15 aa, Blattella germanica
PTKVARVALENAASV

SEQ ID NO: 1015 - protein, 15 aa, Blattella germanica
RVALENAASVSGMLL

SEQ ID NO: 1016 - protein, 15 aa, Blattella germanica
VTEIKKDENNAVPSM

SEQ ID NO: 1017 - protein, 15 aa, Blattella germanica
GWVTQIATNPKYPDM

SEQ ID NO: 1018 - protein, 15 aa, Blattella germanica
KYPDMILSCSRDKTL

SEQ ID NO: 1019 - protein, 15 aa, Blattella germanica
ILSCSRDKTLIVWKL

SEQ ID NO: 1020 - protein, 15 aa, Blattella germanica
RDKTLIVWKLTRDET

SEQ ID NO: 1021 - protein, 15 aa, Blattella germanica
GHSHFVSDVVLSSDG

SEQ ID NO: 1022 - protein, 15 aa, Blattella germanica
VSDVVLSSDGNYALS

SEQ ID NO: 1023 - protein, 15 aa, Blattella germanica
LSSDGNYALSGSWDK

SEQ ID NO: 1024 - protein, 15 aa, Blattella germanica
NYALSGSWDKTLRLW

SEQ ID NO: 1025 - protein, 15 aa, Blattella germanica
TLRLWDLAAGRTTRR

SEQ ID NO: 1026 - protein, 15 aa, Blattella germanica
KDVLSVAFSVDNRQI

SEQ ID NO: 1027 - protein, 15 aa, Blattella germanica
VAFSVDNRQIVSGSR

SEQ ID NO: 1028 - protein, 15 aa, Blattella germanica
DKTIKLWNTLAECKY

SEQ ID NO: 1029 - protein, 15 aa, Blattella germanica
VSCVRFSPNHSNPII

SEQ ID NO: 1030 - protein, 15 aa, Blattella germanica
FSPNHSNPIIVSAGW

SEQ ID NO: 1031 - protein, 15 aa, Blattella germanica
SNPIIVSAGWDKVVK

SEQ ID NO: 1032 - protein, 15 aa, Blattella germanica
DKVVKVWNLTNCKLK

SEQ ID NO: 1033 - protein, 15 aa, Blattella germanica
VWNLTNCKLKINHIG

SEQ ID NO: 1034 - protein, 15 aa, Blattella germanica
NCKLKINHIGHTGYL

SEQ ID NO: 1035 - protein, 15 aa, Blattella germanica
GKDCKAMLWDLNDGK

SEQ ID NO: 1036 - protein, 15 aa, Blattella germanica
AMLWDLNDGKHLHTL

SEQ ID NO: 1037 - protein, 15 aa, Blattella germanica
DHNDIITALCFSPNR

SEQ ID NO: 1038 - protein, 15 aa, Blattella germanica
ITALCFSPNRYWLCA

SEQ ID NO: 1039 - protein, 15 aa, Blattella germanica
YWLCAAFGPSIKIWD

SEQ ID NO: 1040 - protein, 15 aa, Blattella germanica
QTLFAGYFDNTIRVW

SEQ ID NO: 1041 - protein, 15 aa, Blattella germanica
GYFDNTIRVWQVSVF

SEQ ID NO: 1042 - protein, 15 aa, Blattella germanica
FDNTIRVWQVSVFAR

SEQ ID NO: 1043 - protein, 15 aa, Blattella germanica
MGRKFWVGGNWKMNG

SEQ ID NO: 1044 - protein, 15 aa, Blattella germanica
EEIVKFLAAGPLDPN

SEQ ID NO: 1045 - protein, 15 aa, Blattella germanica
VEVVVGIPAIYLEST

SEQ ID NO: 1046 - protein, 15 aa, Blattella germanica
GIPAIYLESTKNILP

SEQ ID NO: 1047 - protein, 15 aa, Blattella germanica
YLESTKNILPSNVAA

SEQ ID NO: 1048 - protein, 15 aa, Blattella germanica
KNILPSNVAAAAQNC

SEQ ID NO: 1049 - protein, 15 aa, Blattella germanica
GAFTGEISPAMLNDI

SEQ ID NO: 1050 - protein, 15 aa, Blattella germanica
EISPAMLNDIGINWV

SEQ ID NO: 1051 - protein, 15 aa, Blattella germanica
MLNDIGINWVILGHS

SEQ ID NO: 1052 - protein, 15 aa, Blattella germanica
GINWVILGHSERRNV

SEQ ID NO: 1053 - protein, 15 aa, Blattella germanica
FGEKDDLISDKVVHA

SEQ ID NO: 1054 - protein, 15 aa, Blattella germanica
DLISDKVVHALESGL

SEQ ID NO: 1055 - protein, 15 aa, Blattella germanica
KVVHALESGLNVVAC

SEQ ID NO: 1056 - protein, 15 aa, Blattella germanica
GKTEEVVFQQTKAIA

SEQ ID NO: 1057 - protein, 15 aa, Blattella germanica
VVFQQTKAIADKIKD

SEQ ID NO: 1058 - protein, 15 aa, Blattella germanica
DKIKDWSKVVIAYEP

SEQ ID NO: 1059 - protein, 15 aa, Blattella germanica
WSKVVIAYEPVWAIG

SEQ ID NO: 1060 - protein, 15 aa, Blattella germanica
IAYEPVWAIGTGKTA

SEQ ID NO: 1061 - protein, 15 aa, Blattella germanica
QDVHKKLREWLSKNV

SEQ ID NO: 1062 - protein, 15 aa, Blattella germanica
DGFLVGGASLKPEFV

SEQ ID NO: 1063 - protein, 15 aa, Blattella germanica
GGASLKPEFVQIINA

SEQ ID NO: 1064 - protein, 15 aa, Blattella germanica
ASLKPEFVQIINAKN

SEQ ID NO: 1065 - protein, 15 aa, Blattella germanica
MFRLVVIATLLVASC

SEQ ID NO: 1066 - protein, 15 aa, Blattella germanica
VIATLLVASCLGAAT

SEQ ID NO: 1067 - protein, 15 aa, Blattella germanica
QLQFEYYGSLMCGAS

SEQ ID NO: 1068 - protein, 15 aa, Blattella germanica
YWTIDFDIAVARVST

SEQ ID NO: 1069 - protein, 15 aa, Blattella germanica
DYDGITANMICAAVP

SEQ ID NO: 1070 - protein, 15 aa, Blattella germanica
YPGVYSNVATLRDFV

SEQ ID NO: 1071 - protein, 15 aa, Blattella germanica
MTWNALLCCLLVSAA

SEQ ID NO: 1072 - protein, 15 aa, Blattella germanica
NALLCCLLVSAASAI

SEQ ID NO: 1073 - protein, 15 aa, Blattella germanica
AASAITPGWLPINSQ

SEQ ID NO: 1074 - protein, 15 aa, Blattella germanica
VANQYTGILYKARLS

SEQ ID NO: 1075 - protein, 15 aa, Blattella germanica
KARLSLDRNEDQLIT

SEQ ID NO: 1076 - protein, 15 aa, Blattella germanica
LDRNEDQLITGKVTE

SEQ ID NO: 1077 - protein, 15 aa, Blattella germanica
DQLITGKVTEAQFSP

SEQ ID NO: 1078 - protein, 15 aa, Blattella germanica
GKVTEAQFSPVNTQF

SEQ ID NO: 1079 - protein, 15 aa, Blattella germanica
AQFSPVNTQFSSGWD

SEQ ID NO: 1080 - protein, 15 aa, Blattella germanica
VNTQFSSGWDESVPD

SEQ ID NO: 1081 - protein, 15 aa, Blattella germanica
SSGWDESVPDEKLHW

SEQ ID NO: 1082 - protein, 15 aa, Blattella germanica
ESVPDEKLHWDVVPM

SEQ ID NO: 1083 - protein, 15 aa, Blattella germanica
QIELNSRGEVRKLRV

SEQ ID NO: 1084 - protein, 15 aa, Blattella germanica
VVVDEDKKVYRVFES

SEQ ID NO: 1085 - protein, 15 aa, Blattella germanica
RVFESTVTGRCEALY

SEQ ID NO: 1086 - protein, 15 aa, Blattella germanica
TVTGRCEALYEVDHL

SEQ ID NO: 1087 - protein, 15 aa, Blattella germanica
CEALYEVDHLYPTTY

SEQ ID NO: 1088 - protein, 15 aa, Blattella germanica
EVDHLYPTTYLNPWQ

SEQ ID NO: 1089 - protein, 15 aa, Blattella germanica
YPTTYLNPWQWTQQH

SEQ ID NO: 1090 - protein, 15 aa, Blattella germanica
LNPWQWTQQHDTKLR

SEQ ID NO: 1091 - protein, 15 aa, Blattella germanica
WTQQHDTKLRIMKTH

SEQ ID NO: 1092 - protein, 15 aa, Blattella germanica
DTKLRIMKTHQFTNC

SEQ ID NO: 1093 - protein, 15 aa, Blattella germanica
IMKTHQFTNCRHNSA

SEQ ID NO: 1094 - protein, 15 aa, Blattella germanica
NAFEYFHLKQHKPET

SEQ ID NO: 1095 - protein, 15 aa, Blattella germanica
AVSRVIADGDNLKNF

SEQ ID NO: 1096 - protein, 15 aa, Blattella germanica
IADGDNLKNFTFYSG

SEQ ID NO: 1097 - protein, 15 aa, Blattella germanica
IVLNPEIYNKQKGML

SEQ ID NO: 1098 - protein, 15 aa, Blattella germanica
VSHINVTVERKGREL

SEQ ID NO: 1099 - protein, 15 aa, Blattella germanica
VTVERKGRELTVIDY

SEQ ID NO: 1100 - protein, 15 aa, Blattella germanica
ELRNVGDLSYSTSLV

SEQ ID NO: 1101 - protein, 15 aa, Blattella germanica
RNSASMDLSSSSMSS

SEQ ID NO: 1102 - protein, 15 aa, Blattella germanica
MDLSSSSMSSSSSSS

SEQ ID NO: 1103 - protein, 15 aa, Blattella germanica
SSMSSSSSSSSSSSS

SEQ ID NO: 1104 - protein, 15 aa, Blattella germanica
SSSSSSSSSSSSSSS

SEQ ID NO: 1105 - protein, 15 aa, Blattella germanica
SSSSSSSSSSSSSSS

SEQ ID NO: 1106 - protein, 15 aa, Blattella germanica
SSSSSSSSSSSEEHH

SEQ ID NO: 1107 - protein, 15 aa, Blattella germanica
SSSSSSEEHHSHNQK

SEQ ID NO: 1108 - protein, 15 aa, Blattella germanica
SEEHHSHNQKLSKKR

SEQ ID NO: 1109 - protein, 15 aa, Blattella germanica
QVPLPRPLFEANFDA

SEQ ID NO: 1110 - protein, 15 aa, Blattella germanica
RPLFEANFDASSGLT

SEQ ID NO: 1111 - protein, 15 aa, Blattella germanica
ANFDASSGLTTEQPV

SEQ ID NO: 1112 - protein, 15 aa, Blattella germanica
SSGLTTEQPVTFRPR

SEQ ID NO: 1113 - protein, 15 aa, Blattella germanica
TEQPVTFRPRRQLFQ

SEQ ID NO: 1114 - protein, 15 aa, Blattella germanica
TFRPRRQLFQGQDMS

SEQ ID NO: 1115 - protein, 15 aa, Blattella germanica
RQLFQGQDMSEEETE

SEQ ID NO: 1116 - protein, 15 aa, Blattella germanica
GQDMSEEETEQNPEI

SEQ ID NO: 1117 - protein, 15 aa, Blattella germanica
EEETEQNPEIIPANL

SEQ ID NO: 1118 - protein, 15 aa, Blattella germanica
LIHNTKQVDVDPVGV

SEQ ID NO: 1119 - protein, 15 aa, Blattella germanica
KQVDVDPVGVAVRLS

SEQ ID NO: 1120 - protein, 15 aa, Blattella germanica
KDIAADLQGEPRVGE

SEQ ID NO: 1121 - protein, 15 aa, Blattella germanica
DLQGEPRVGEDRHIL

SEQ ID NO: 1122 - protein, 15 aa, Blattella germanica
PRVGEDRHILPRFTI

SEQ ID NO: 1123 - protein, 15 aa, Blattella germanica
AARKLYKLENDHPNY

SEQ ID NO: 1124 - protein, 15 aa, Blattella germanica
DHPNYMNWDTWRVYR

SEQ ID NO: 1125 - protein, 15 aa, Blattella germanica
MNWDTWRVYRDAVSQ

SEQ ID NO: 1126 - protein, 15 aa, Blattella germanica
WRVYRDAVSQAGTWS

SEQ ID NO: 1127 - protein, 15 aa, Blattella germanica
DAVSQAGTWSALNSI

SEQ ID NO: 1128 - protein, 15 aa, Blattella germanica
SEMVEPKEASHLITV

SEQ ID NO: 1129 - protein, 15 aa, Blattella germanica
LPAAVSDKNKAYLHF

SEQ ID NO: 1130 - protein, 15 aa, Blattella germanica
SDKNKAYLHFLFEMT

SEQ ID NO: 1131 - protein, 15 aa, Blattella germanica
IPYLVQEFDDAVKEN

SEQ ID NO: 1132 - protein, 15 aa, Blattella germanica
EHNPRKVIDLLLSLY

SEQ ID NO: 1133 - protein, 15 aa, Blattella germanica
LDQNEHADIRVEALF

SEQ ID NO: 1134 - protein, 15 aa, Blattella germanica
AELTHTESNNQVLSA

SEQ ID NO: 1135 - protein, 15 aa, Blattella germanica
TESNNQVLSASQSAI

SEQ ID NO: 1136 - protein, 15 aa, Blattella germanica
SQSAIKSAANVEGDI

SEQ ID NO: 1137 - protein, 15 aa, Blattella germanica
KSAANVEGDIYSEMR

SEQ ID NO: 1138 - protein, 15 aa, Blattella germanica
VEGDIYSEMRRKAKA

SEQ ID NO: 1139 - protein, 15 aa, Blattella germanica
RKAKAVEHLLSTRNM

SEQ ID NO: 1140 - protein, 15 aa, Blattella germanica
KINYDSLYNLNYIGS

SEQ ID NO: 1141 - protein, 15 aa, Blattella germanica
SLYNLNYIGSEDSIY

SEQ ID NO: 1142 - protein, 15 aa, Blattella germanica
NYIGSEDSIYPKSML

SEQ ID NO: 1143 - protein, 15 aa, Blattella germanica
NNLGRINTHVQKGYM

SEQ ID NO: 1144 - protein, 15 aa, Blattella germanica
INTHVQKGYMVSSMT

SEQ ID NO: 1145 - protein, 15 aa, Blattella germanica
VSSMTDLWEAFHTIY

SEQ ID NO: 1146 - protein, 15 aa, Blattella germanica
FHTIYKKDNGSPTDP

SEQ ID NO: 1147 - protein, 15 aa, Blattella germanica
KKDNGSPTDPKTLVK

SEQ ID NO: 1148 - protein, 15 aa, Blattella germanica
SPTDPKTLVKFVEGN

SEQ ID NO: 1149 - protein, 15 aa, Blattella germanica
FVEGNLKYFNMGVQK

SEQ ID NO: 1150 - protein, 15 aa, Blattella germanica
KTYKKPTNFNHTKLS

SEQ ID NO: 1151 - protein, 15 aa, Blattella germanica
TLTLPCAMGLPAYFK

SEQ ID NO: 1152 - protein, 15 aa, Blattella germanica
CAMGLPAYFKMNSPS

SEQ ID NO: 1153 - protein, 15 aa, Blattella germanica
LWKYNGEFSIQTDAK

SEQ ID NO: 1154 - protein, 15 aa, Blattella germanica
QTDAKTDVPMSLENF

SEQ ID NO: 1155 - protein, 15 aa, Blattella germanica
HAQLAFSTAFDNKEY

SEQ ID NO: 1156 - protein, 15 aa, Blattella germanica
FSTAFDNKEYISGLD

SEQ ID NO: 1157 - protein, 15 aa, Blattella germanica
DNKEYISGLDRKVEV

SEQ ID NO: 1158 - protein, 15 aa, Blattella germanica
ISGLDRKVEVHVPVK

SEQ ID NO: 1159 - protein, 15 aa, Blattella germanica
IIPLFTDRDYDVLQW

SEQ ID NO: 1160 - protein, 15 aa, Blattella germanica
TDRDYDVLQWQTIPY

SEQ ID NO: 1161 - protein, 15 aa, Blattella germanica
TTIHNVPDFETVYMD

SEQ ID NO: 1162 - protein, 15 aa, Blattella germanica
TAHFEKKMGENTGIV

SEQ ID NO: 1163 - protein, 15 aa, Blattella germanica
KKMGENTGIVFKVKY

SEQ ID NO: 1164 - protein, 15 aa, Blattella germanica
DTDQEFLDTKWFLDE

SEQ ID NO: 1165 - protein, 15 aa, Blattella germanica
LFTGLNYDVPTKDIF

SEQ ID NO: 1166 - protein, 15 aa, Blattella germanica
NYDVPTKDIFYNNLT

SEQ ID NO: 1167 - protein, 15 aa, Blattella germanica
YNNLTVYYDHEDTKN

SEQ ID NO: 1168 - protein, 15 aa, Blattella germanica
VYYDHEDTKNHAVSF

SEQ ID NO: 1169 - protein, 15 aa, Blattella germanica
EDTKNHAVSFTVTKE

SEQ ID NO: 1170 - protein, 15 aa, Blattella germanica
HAVSFTVTKEQSKFY

SEQ ID NO: 1171 - protein, 15 aa, Blattella germanica
TVTKEQSKFYETLNP

SEQ ID NO: 1172 - protein, 15 aa, Blattella germanica
LKLSSGKKQKHRNVK

SEQ ID NO: 1173 - protein, 15 aa, Blattella germanica
GKKQKHRNVKSHRIR

SEQ ID NO: 1174 - protein, 15 aa, Blattella germanica
SHRIRREYTEDENPA

SEQ ID NO: 1175 - protein, 15 aa, Blattella germanica
REYTEDENPAIPKDK

SEQ ID NO: 1176 - protein, 15 aa, Blattella germanica
DENPAIPKDKQPNSH

SEQ ID NO: 1177 - protein, 15 aa, Blattella germanica
IPKDKQPNSHPRRQE

SEQ ID NO: 1178 - protein, 15 aa, Blattella germanica
QPNSHPRRQEYLSKS

SEQ ID NO: 1179 - protein, 15 aa, Blattella germanica
MALTGDATAVVLDMT

SEQ ID NO: 1180 - protein, 15 aa, Blattella germanica
VLDMTLKFEGPAESY

SEQ ID NO: 1181 - protein, 15 aa, Blattella germanica
LKFEGPAESYFTTTV

SEQ ID NO: 1182 - protein, 15 aa, Blattella germanica
FYDQHYYEEKKRNQF

SEQ ID NO: 1183 - protein, 15 aa, Blattella germanica
YYEEKKRNQFCLSWS

SEQ ID NO: 1184 - protein, 15 aa, Blattella germanica
EFDPNSKVHAIMNIG

SEQ ID NO: 1185 - protein, 15 aa, Blattella germanica
IMNIGKECENGGSAV

SEQ ID NO: 1186 - protein, 15 aa, Blattella germanica
KECENGGSAVANIDM

SEQ ID NO: 1187 - protein, 15 aa, Blattella germanica
KNLTVSKLCDHEMRT

SEQ ID NO: 1188 - protein, 15 aa, Blattella germanica
SKLCDHEMRTKRDHV

SEQ ID NO: 1189 - protein, 15 aa, Blattella germanica
HEMRTKRDHVLPACR

SEQ ID NO: 1190 - protein, 15 aa, Blattella germanica
KRDHVLPACRNSTER

SEQ ID NO: 1191 - protein, 15 aa, Blattella germanica
LPACRNSTERASDLN

SEQ ID NO: 1192 - protein, 15 aa, Blattella germanica
NSTERASDLNRVHVD

SEQ ID NO: 1193 - protein, 15 aa, Blattella germanica
INYNLKQHETFKRRV

SEQ ID NO: 1194 - protein, 15 aa, Blattella germanica
KQHETFKRRVYKVYD

SEQ ID NO: 1195 - protein, 15 aa, Blattella germanica
LYPHVSEDVIVDNPA

SEQ ID NO: 1196 - protein, 15 aa, Blattella germanica
DNTRAFNVSIETPVL

SEQ ID NO: 1197 - protein, 15 aa, Blattella germanica
FNVSIETPVLSVNAT

SEQ ID NO: 1198 - protein, 15 aa, Blattella germanica
ETPVLSVNATSVRLQ

SEQ ID NO: 1199 - protein, 15 aa, Blattella germanica
SVNATSVRLQSWQSE

SEQ ID NO: 1200 - protein, 15 aa, Blattella germanica
SVRLQSWQSEMLRMN

SEQ ID NO: 1201 - protein, 15 aa, Blattella germanica
PRTSFAKRFAKWALP

SEQ ID NO: 1202 - protein, 15 aa, Blattella germanica
AKRFAKWALPLYYKP

SEQ ID NO: 1203 - protein, 15 aa, Blattella germanica
KWALPLYYKPTCVVD

SEQ ID NO: 1204 - protein, 15 aa, Blattella germanica
LYYKPTCVVDSSYIN

SEQ ID NO: 1205 - protein, 15 aa, Blattella germanica
TCVVDSSYINTFDNF

SEQ ID NO: 1206 - protein, 15 aa, Blattella germanica
ILDIPQKFNMEYFKV

SEQ ID NO: 1207 - protein, 15 aa, Blattella germanica
AFKPTSPVPNMQREV

SEQ ID NO: 1208 - protein, 15 aa, Blattella germanica
SPVPNMQREVLVFLR

SEQ ID NO: 1209 - protein, 15 aa, Blattella germanica
NAKIELKPNQGMPEV

SEQ ID NO: 1210 - protein, 15 aa, Blattella germanica
LKPNQGMPEVYVEGK

SEQ ID NO: 1211 - protein, 15 aa, Blattella germanica
GMPEVYVEGKRVDYN

SEQ ID NO: 1212 - protein, 15 aa, Blattella germanica
YVEGKRVDYNHHHST

SEQ ID NO: 1213 - protein, 15 aa, Blattella germanica
RVDYNHHHSTDLNVS

SEQ ID NO: 1214 - protein, 15 aa, Blattella germanica
HHHSTDLNVSQDRIG

SEQ ID NO: 1215 - protein, 15 aa, Blattella germanica
DLNVSQDRIGYVYAL

SEQ ID NO: 1216 - protein, 15 aa, Blattella germanica
QDRIGYVYALPTKAA

SEQ ID NO: 1217 - protein, 15 aa, Blattella germanica
YVYALPTKAAHIVFP

SEQ ID NO: 1218 - protein, 15 aa, Blattella germanica
PTKAAHIVFPSYEIE

SEQ ID NO: 1219 - protein, 15 aa, Blattella germanica
HIVFPSYEIEMFYDG

SEQ ID NO: 1220 - protein, 15 aa, Blattella germanica
SYEIEMFYDGSRIMI

SEQ ID NO: 1221 - protein, 15 aa, Blattella germanica
MFYDGSRIMIQASNM

SEQ ID NO: 1222 - protein, 15 aa, Blattella germanica
SRIMIQASNMYRNFT

SEQ ID NO: 1223 - protein, 15 aa, Blattella germanica
QASNMYRNFTKGLCG

SEQ ID NO: 1224 - protein, 15 aa, Blattella germanica
YRNFTKGLCGNMDGE

SEQ ID NO: 1225 - protein, 15 aa, Blattella germanica
KGLCGNMDGEFVNDV

SEQ ID NO: 1226 - protein, 15 aa, Blattella germanica
NMDGEFVNDVLTPWG

SEQ ID NO: 1227 - protein, 15 aa, Blattella germanica
FVNDVLTPWGCYAKD

SEQ ID NO: 1228 - protein, 15 aa, Blattella germanica
LTPWGCYAKDMALFV

SEQ ID NO: 1229 - protein, 15 aa, Blattella germanica
CYAKDMALFVASYAD

SEQ ID NO: 1230 - protein, 15 aa, Blattella germanica
MALFVASYADNSNSE

SEQ ID NO: 1231 - protein, 15 aa, Blattella germanica
ASYADNSNSEVRKIK

SEQ ID NO: 1232 - protein, 15 aa, Blattella germanica
NSNSEVRKIKATQNE

SEQ ID NO: 1233 - protein, 15 aa, Blattella germanica
VRKIKATQNEQTCVP

SEQ ID NO: 1234 - protein, 15 aa, Blattella germanica
ATQNEQTCVPQFHQP

SEQ ID NO: 1235 - protein, 15 aa, Blattella germanica
QTCVPQFHQPLVSHQ

SEQ ID NO: 1236 - protein, 15 aa, Blattella germanica
QFHQPLVSHQMRLSQ

SEQ ID NO: 1237 - protein, 15 aa, Blattella germanica
LVSHQMRLSQVIKLA

SEQ ID NO: 1238 - protein, 15 aa, Blattella germanica
MRLSQVIKLADTSSS

SEQ ID NO: 1239 - protein, 15 aa, Blattella germanica
VIKLADTSSSSESSS

SEQ ID NO: 1240 - protein, 15 aa, Blattella germanica
DTSSSSESSSSSESH

SEQ ID NO: 1241 - protein, 15 aa, Blattella germanica
SESSSSSESHENNSS

SEQ ID NO: 1242 - protein, 15 aa, Blattella germanica
SSESHENNSSPSSES

SEQ ID NO: 1243 - protein, 15 aa, Blattella germanica
ENNSSPSSESQVNKS

SEQ ID NO: 1244 - protein, 15 aa, Blattella germanica
PSSESQVNKSKRQPN

SEQ ID NO: 1245 - protein, 15 aa, Blattella germanica
QVNKSKRQPNSRPRS

SEQ ID NO: 1246 - protein, 15 aa, Blattella germanica
KRQPNSRPRSSSSSS

SEQ ID NO: 1247 - protein, 15 aa, Blattella germanica
SRPRSSSSSSSSSSS

SEQ ID NO: 1248 - protein, 15 aa, Blattella germanica
SSSSSSSSSSESNES

SEQ ID NO: 1249 - protein, 15 aa, Blattella germanica
SSSSSESNESVLAKK

SEQ ID NO: 1250 - protein, 15 aa, Blattella germanica
ESNESVLAKKIINNQ

SEQ ID NO: 1251 - protein, 15 aa, Blattella germanica
VLAKKIINNQIGPKP

SEQ ID NO: 1252 - protein, 15 aa, Blattella germanica
IINNQIGPKPTLIPS

SEQ ID NO: 1253 - protein, 15 aa, Blattella germanica
IGPKPTLIPSQSPMT

SEQ ID NO: 1254 - protein, 15 aa, Blattella germanica
TLIPSQSPMTSDDKC

SEQ ID NO: 1255 - protein, 15 aa, Blattella germanica
QSPMTSDDKCMTQQP

SEQ ID NO: 1256 - protein, 15 aa, Blattella germanica
SDDKCMTQQPRHTYY

SEQ ID NO: 1257 - protein, 15 aa, Blattella germanica
MTQQPRHTYYENQFC

SEQ ID NO: 1258 - protein, 15 aa, Blattella germanica
RHTYYENQFCVSEKP

SEQ ID NO: 1259 - protein, 15 aa, Blattella germanica
ENQFCVSEKPLDTCM

SEQ ID NO: 1260 - protein, 15 aa, Blattella germanica
VSEKPLDTCMPLICH

SEQ ID NO: 1261 - protein, 15 aa, Blattella germanica
LDTCMPLICHATESY

SEQ ID NO: 1262 - protein, 15 aa, Blattella germanica
PLICHATESYTIDVN

SEQ ID NO: 1263 - protein, 15 aa, Blattella germanica
ATESYTIDVNFYCVP

SEQ ID NO: 1264 - protein, 15 aa, Blattella germanica
TIDVNFYCVPLGPAA

SEQ ID NO: 1265 - protein, 15 aa, Blattella germanica
FYCVPLGPAANHYMK

SEQ ID NO: 1266 - protein, 15 aa, Blattella germanica
LGPAANHYMKLVKKG

SEQ ID NO: 1267 - protein, 15 aa, Blattella germanica
NHYMKLVKKGILPDL

SEQ ID NO: 1268 - protein, 15 aa, Blattella germanica
LVKKGILPDLSRNRN

SEQ ID NO: 1269 - protein, 15 aa, Blattella germanica
ILPDLSRNRNGKRVV

SEQ ID NO: 1270 - protein, 15 aa, Blattella germanica
SRNRNGKRVVLPVEI

SEQ ID NO: 1271 - protein, 15 aa, Blattella germanica
GKRVVLPVEIPIQCE

SEQ ID NO: 1272 - protein, 15 aa, Blattella germanica
VLPVEIPIQCEPVLN

SEQ ID NO: 1273 - protein, 15 aa, Blattella germanica
SCITYQRGSHAGNKL

SEQ ID NO: 1274 - protein, 15 aa, Blattella germanica
AGNKLAMQEFMILPT

SEQ ID NO: 1275 - protein, 15 aa, Blattella germanica
NKLAMQEFMILPTGA

SEQ ID NO: 1276 - protein, 15 aa, Blattella germanica
AMQEFMILPTGAATF

SEQ ID NO: 1277 - protein, 15 aa, Blattella germanica
MGSEVYHHLKNVIKG

SEQ ID NO: 1278 - protein, 15 aa, Blattella germanica
YHHLKNVIKGKFGLD

SEQ ID NO: 1279 - protein, 15 aa, Blattella germanica
KDGLDLIKDAIEKAG

SEQ ID NO: 1280 - protein, 15 aa, Blattella germanica
LDLIKDAIEKAGYTG

SEQ ID NO: 1281 - protein, 15 aa, Blattella germanica
LIKDAIEKAGYTGKI

SEQ ID NO: 1282 - protein, 15 aa, Blattella germanica
KIEIGMDVAASEFFR

SEQ ID NO: 1283 - protein, 15 aa, Blattella germanica
KYDLDFKNPNTDKSK

SEQ ID NO: 1284 - protein, 15 aa, Blattella germanica
SKWIDKDQLTALYME

SEQ ID NO: 1285 - protein, 15 aa, Blattella germanica
KDQLTALYMEFIKEF

SEQ ID NO: 1286 - protein, 15 aa, Blattella germanica
ALYMEFIKEFPVVSI

SEQ ID NO: 1287 - protein, 15 aa, Blattella germanica
FIKEFPVVSIEDPFD

SEQ ID NO: 1288 - protein, 15 aa, Blattella germanica
QDHWDAWTAMTAATP

SEQ ID NO: 1289 - protein, 15 aa, Blattella germanica
AWTAMTAATPIQIVG

SEQ ID NO: 1290 - protein, 15 aa, Blattella germanica
DDLTVTNPTRIQTAI

SEQ ID NO: 1291 - protein, 15 aa, Blattella germanica
NCLLLKVNQIGTVTE

SEQ ID NO: 1292 - protein, 15 aa, Blattella germanica
LLLKVNQIGTVTESI

SEQ ID NO: 1293 - protein, 15 aa, Blattella germanica
GTVTESIQAHTLAKA

SEQ ID NO: 1294 - protein, 15 aa, Blattella germanica
VTESIQAHTLAKANG

SEQ ID NO: 1295 - protein, 15 aa, Blattella germanica
NGWGTMVSHRSGETE

SEQ ID NO: 1296 - protein, 15 aa, Blattella germanica
WGTMVSHRSGETEDS

SEQ ID NO: 1297 - protein, 15 aa, Blattella germanica
ETEDSFIADLVVGLS

SEQ ID NO: 1298 - protein, 15 aa, Blattella germanica
DSFIADLVVGLSTGQ

SEQ ID NO: 1299 - protein, 15 aa, Blattella germanica
PCRSERLAKYNQILR

SEQ ID NO: 1300 - protein, 15 aa, Blattella germanica
RLAKYNQILRIEEEL

SEQ ID NO: 1301 - protein, 15 aa, Blattella germanica
AKYNQILRIEEELGD

SEQ ID NO: 1302 - protein, 15 aa, Blattella germanica
NALLCCLLVSAASAI

SEQ ID NO: 1303 - protein, 15 aa, Blattella germanica
ALLCCLLVSAASAIT

SEQ ID NO: 1304 - protein, 15 aa, Blattella germanica
CLLVSAASAITPGWL

SEQ ID NO: 1305 - protein, 15 aa, Blattella germanica
TPGWLPINSQLDYHV

SEQ ID NO: 1306 - protein, 15 aa, Blattella germanica
PINSQLDYHVHGRTF

SEQ ID NO: 1307 - protein, 15 aa, Blattella germanica
LDYHVHGRTFSSLFQ

SEQ ID NO: 1308 - protein, 15 aa, Blattella germanica
HGRTFSSLFQVANQY

SEQ ID NO: 1309 - protein, 15 aa, Blattella germanica
SSLFQVANQYTGILY

SEQ ID NO: 1310 - protein, 15 aa, Blattella germanica
TGILYKARLSLDRNE

SEQ ID NO: 1311 - protein, 15 aa, Blattella germanica
EKLHWDVVPMSQQPF

SEQ ID NO: 1312 - protein, 15 aa, Blattella germanica
DVVPMSQQPFQIELN

SEQ ID NO: 1313 - protein, 15 aa, Blattella germanica
SQQPFQIELNSRGEV

SEQ ID NO: 1314 - protein, 15 aa, Blattella germanica
SRGEVRKLRVNKFVE

SEQ ID NO: 1315 - protein, 15 aa, Blattella germanica
RKLRVNKFVELWEIN

SEQ ID NO: 1316 - protein, 15 aa, Blattella germanica
NKFVELWEINMIKAI

SEQ ID NO: 1317 - protein, 15 aa, Blattella germanica
LWEINMIKAIISQLQ

SEQ ID NO: 1318 - protein, 15 aa, Blattella germanica
MIKAIISQLQVVVDE

SEQ ID NO: 1319 - protein, 15 aa, Blattella germanica
ISQLQVVVDEDKKVY

SEQ ID NO: 1320 - protein, 15 aa, Blattella germanica
DKKVYRVFESTVTGR

SEQ ID NO: 1321 - protein, 15 aa, Blattella germanica
DTKLRIMKNHQFTNC

SEQ ID NO: 1322 - protein, 15 aa, Blattella germanica
QFTNCRHNSAYKLHF

SEQ ID NO: 1323 - protein, 15 aa, Blattella germanica
RHNSAYKLHFNAFEY

SEQ ID NO: 1324 - protein, 15 aa, Blattella germanica
YKLHFNAFEYFHLKQ

SEQ ID NO: 1325 - protein, 15 aa, Blattella germanica
FHLKQHKPETFLSNS

SEQ ID NO: 1326 - protein, 15 aa, Blattella germanica
HKPETFLSNSAVSRV

SEQ ID NO: 1327 - protein, 15 aa, Blattella germanica
FLSNSAVSRVIADGD

SEQ ID NO: 1328 - protein, 15 aa, Blattella germanica
NLKNFTFYSGETIHK

SEQ ID NO: 1329 - protein, 15 aa, Blattella germanica
TFYSGETIHKIVLNP

SEQ ID NO: 1330 - protein, 15 aa, Blattella germanica
ETIHKIVLNPEIYNK

SEQ ID NO: 1331 - protein, 15 aa, Blattella germanica
EIYNKQKGMLVSHIN

SEQ ID NO: 1332 - protein, 15 aa, Blattella germanica
QKGMLVSHINVTVER

SEQ ID NO: 1333 - protein, 15 aa, Blattella germanica
KGRELTVIDYELRNV

SEQ ID NO: 1334 - protein, 15 aa, Blattella germanica
TVIDYELRNVGDLSY

SEQ ID NO: 1335 - protein, 15 aa, Blattella germanica
GDLSYSTSLVKAHSM

SEQ ID NO: 1336 - protein, 15 aa, Blattella germanica
STSLVKAHSMRNSAS

SEQ ID NO: 1337 - protein, 15 aa, Blattella germanica
KAHSMRNSASMDLSS

SEQ ID NO: 1338 - protein, 15 aa, Blattella germanica
SHNQKLSKKRQVPLP

SEQ ID NO: 1339 - protein, 15 aa, Blattella germanica
LSKKRQVPLPRPLFE

SEQ ID NO: 1340 - protein, 15 aa, Blattella germanica
QNPEIIPANLLPTYN

SEQ ID NO: 1341 - protein, 15 aa, Blattella germanica
IPANLLPTYNLIHNT

SEQ ID NO: 1342 - protein, 15 aa, Blattella germanica
LPTYNLIHNTKQVDV

SEQ ID NO: 1343 - protein, 15 aa, Blattella germanica
DPVGVAVRLSKDIAA

SEQ ID NO: 1344 - protein, 15 aa, Blattella germanica
AVRLSKDIAADLQGE

SEQ ID NO: 1345 - protein, 15 aa, Blattella germanica
DRHILPRFTILVRLL

SEQ ID NO: 1346 - protein, 15 aa, Blattella germanica
PRFTILVRLLKQLKV

SEQ ID NO: 1347 - protein, 15 aa, Blattella germanica
LVRLLKQLKVSQIME

SEQ ID NO: 1348 - protein, 15 aa, Blattella germanica
KQLKVSQIMEAARKL

SEQ ID NO: 1349 - protein, 15 aa, Blattella germanica
SQIMEAARKLYKLEN

SEQ ID NO: 1350 - protein, 15 aa, Blattella germanica
YKLENDHPNYMNWDT

SEQ ID NO: 1351 - protein, 15 aa, Blattella germanica
AGTWSALNSIQQFIS

SEQ ID NO: 1352 - protein, 15 aa, Blattella germanica
ALNSIQQFISSEMVE

SEQ ID NO: 1353 - protein, 15 aa, Blattella germanica
QQFISSEMVEPKEAS

SEQ ID NO: 1354 - protein, 15 aa, Blattella germanica
PKEASHLITVLPAAV

SEQ ID NO: 1355 - protein, 15 aa, Blattella germanica
HLITVLPAAVSDKNK

SEQ ID NO: 1356 - protein, 15 aa, Blattella germanica
AYLHFLFEMTKDPVF

SEQ ID NO: 1357 - protein, 15 aa, Blattella germanica
LFEMTKDPVFKNMTY

SEQ ID NO: 1358 - protein, 15 aa, Blattella germanica
KDPVFKNMTYVNTSL

SEQ ID NO: 1359 - protein, 15 aa, Blattella germanica
KNMTYVNTSLVLAFS

SEQ ID NO: 1360 - protein, 15 aa, Blattella germanica
VNTSLVLAFSEVIHQ

SEQ ID NO: 1361 - protein, 15 aa, Blattella germanica
VLAFSEVIHQVEMHQ

SEQ ID NO: 1362 - protein, 15 aa, Blattella germanica
EVIHQVEMHQVRDLK

SEQ ID NO: 1363 - protein, 15 aa, Blattella germanica
VEMHQVRDLKIKSVY

SEQ ID NO: 1364 - protein, 15 aa, Blattella germanica
VRDLKIKSVYIPYLV

SEQ ID NO: 1365 - protein, 15 aa, Blattella germanica
IKSVYIPYLVQEFDD

SEQ ID NO: 1366 - protein, 15 aa, Blattella germanica
QEFDDAVKENNSIKI

SEQ ID NO: 1367 - protein, 15 aa, Blattella germanica
AVKENNSIKIQLYTH

SEQ ID NO: 1368 - protein, 15 aa, Blattella germanica
NSIKIQLYTHALGVT

SEQ ID NO: 1369 - protein, 15 aa, Blattella germanica
QLYTHALGVTGNTHI

SEQ ID NO: 1370 - protein, 15 aa, Blattella germanica
ALGVTGNTHILHYLR

SEQ ID NO: 1371 - protein, 15 aa, Blattella germanica
GNTHILHYLRPYIIQ

SEQ ID NO: 1372 - protein, 15 aa, Blattella germanica
LHYLRPYIIQLKTIT

SEQ ID NO: 1373 - protein, 15 aa, Blattella germanica
PYIIQLKTITHHQRL

SEQ ID NO: 1374 - protein, 15 aa, Blattella germanica
LKTITHHQRLFMVQS

SEQ ID NO: 1375 - protein, 15 aa, Blattella germanica
HHQRLFMVQSLERVV

SEQ ID NO: 1376 - protein, 15 aa, Blattella germanica
FMVQSLERVVEHNPR

SEQ ID NO: 1377 - protein, 15 aa, Blattella germanica
LERVVEHNPRKVIDL

SEQ ID NO: 1378 - protein, 15 aa, Blattella germanica
KVIDLLLSLYLDQNE

SEQ ID NO: 1379 - protein, 15 aa, Blattella germanica
LLSLYLDQNEHADIR

SEQ ID NO: 1380 - protein, 15 aa, Blattella germanica
HADIRVEALFLLMKA

SEQ ID NO: 1381 - protein, 15 aa, Blattella germanica
VEALFLLMKADPSIH

SEQ ID NO: 1382 - protein, 15 aa, Blattella germanica
LLMKADPSIHVLKMV

SEQ ID NO: 1383 - protein, 15 aa, Blattella germanica
DPSIHVLKMVAELTH

SEQ ID NO: 1384 - protein, 15 aa, Blattella germanica
VLKMVAELTHTESNN

SEQ ID NO: 1385 - protein, 15 aa, Blattella germanica
QVLSASQSAIKSAAN

SEQ ID NO: 1386 - protein, 15 aa, Blattella germanica
YSEMRRKAKAVEHLL

SEQ ID NO: 1387 - protein, 15 aa, Blattella germanica
VEHLLSTRNMDVSYS

SEQ ID NO: 1388 - protein, 15 aa, Blattella germanica
STRNMDVSYSKSYLY

SEQ ID NO: 1389 - protein, 15 aa, Blattella germanica
DVSYSKSYLYGYKSK

SEQ ID NO: 1390 - protein, 15 aa, Blattella germanica
KSYLYGYKSKKINYD

SEQ ID NO: 1391 - protein, 15 aa, Blattella germanica
GYKSKKINYDSLYNL

SEQ ID NO: 1392 - protein, 15 aa, Blattella germanica
KINYDSLYNLNNIGS

SEQ ID NO: 1393 - protein, 15 aa, Blattella germanica
EDSIYPKSMLLNIFT

SEQ ID NO: 1394 - protein, 15 aa, Blattella germanica
PKSMLLNIFTNNLGR

SEQ ID NO: 1395 - protein, 15 aa, Blattella germanica
LNIFTNNLGRINTHV

SEQ ID NO: 1396 - protein, 15 aa, Blattella germanica
QKGYMVSSMTDLWEA

SEQ ID NO: 1397 - protein, 15 aa, Blattella germanica
DLWEAFHTIYKKDNG

SEQ ID NO: 1398 - protein, 15 aa, Blattella germanica
KTLVKFVEGNLKYFN

SEQ ID NO: 1399 - protein, 15 aa, Blattella germanica
LKYFNMGVQKFWAFD

SEQ ID NO: 1400 - protein, 15 aa, Blattella germanica
MGVQKFWAFDNTTFS

SEQ ID NO: 1401 - protein, 15 aa, Blattella germanica
FWAFDNTTFSNASAV

SEQ ID NO: 1402 - protein, 15 aa, Blattella germanica
NTTFSNASAVIQEFL

SEQ ID NO: 1403 - protein, 15 aa, Blattella germanica
NASAVIQEFLKTYKK

SEQ ID NO: 1404 - protein, 15 aa, Blattella germanica
IQEFLKTYKKPTNFN

SEQ ID NO: 1405 - protein, 15 aa, Blattella germanica
PTNFNHTKLSSSSSI

SEQ ID NO: 1406 - protein, 15 aa, Blattella germanica
HTKLSSSSSITLTLP

SEQ ID NO: 1407 - protein, 15 aa, Blattella germanica
SSSSITLTLPCAMGL

SEQ ID NO: 1408 - protein, 15 aa, Blattella germanica
PAYFKMNSPSLWKYN

SEQ ID NO: 1409 - protein, 15 aa, Blattella germanica
MNSPSLWKYNGEFSI

SEQ ID NO: 1410 - protein, 15 aa, Blattella germanica
GEFSIQTDAKTDVPM

SEQ ID NO: 1411 - protein, 15 aa, Blattella germanica
TDVPMSLENFMNITG

SEQ ID NO: 1412 - protein, 15 aa, Blattella germanica
SLENFMNITGSINLM

SEQ ID NO: 1413 - protein, 15 aa, Blattella germanica
MNITGSINLMFSQMY

SEQ ID NO: 1414 - protein, 15 aa, Blattella germanica
SINLMFSQMYHAQLA

SEQ ID NO: 1415 - protein, 15 aa, Blattella germanica
FSQMYHAQLAFSTAF

SEQ ID NO: 1416 - protein, 15 aa, Blattella germanica
RKVEVHVPVKFQINL

SEQ ID NO: 1417 - protein, 15 aa, Blattella germanica
HVPVKFQINLDFKNH

SEQ ID NO: 1418 - protein, 15 aa, Blattella germanica
FQINLDFKNHNGFIR

SEQ ID NO: 1419 - protein, 15 aa, Blattella germanica
DFKNHNGFIRIIPLF

SEQ ID NO: 1420 - protein, 15 aa, Blattella germanica
NGFIRIIPLFTDRDY

SEQ ID NO: 1421 - protein, 15 aa, Blattella germanica
DVLQWQTIPYTTIHN

SEQ ID NO: 1422 - protein, 15 aa, Blattella germanica
QTIPYTTIHNVPDFE

SEQ ID NO: 1423 - protein, 15 aa, Blattella germanica
RLFHTQPSITYQTLK

SEQ ID NO: 1424 - protein, 15 aa, Blattella germanica
VPDFETVYMDQLFKL

SEQ ID NO: 1425 - protein, 15 aa, Blattella germanica
YQTLKQSTWINYFKL

SEQ ID NO: 1426 - protein, 15 aa, Blattella germanica
TVYMDQLFKLIHVRK

SEQ ID NO: 1427 - protein, 15 aa, Blattella germanica
QSTWINYFKLIHVRK

SEQ ID NO: 1428 - protein, 15 aa, Blattella germanica
QLFKLIHVRKTAHFE

SEQ ID NO: 1429 - protein, 15 aa, Blattella germanica
NYFKLIHVRKTAHFE

SEQ ID NO: 1430 - protein, 15 aa, Blattella germanica
IHVRKTAHFEKKMGE

SEQ ID NO: 1431 - protein, 15 aa, Blattella germanica
NTGIVFKVKYDTDQE

SEQ ID NO: 1432 - protein, 15 aa, Blattella germanica
FKVKYDTDQEFLDTK

SEQ ID NO: 1433 - protein, 15 aa, Blattella germanica
FLDTKWFLDEFKVLQ

SEQ ID NO: 1434 - protein, 15 aa, Blattella germanica
WFLDEFKVLQLFTGL

SEQ ID NO: 1435 - protein, 15 aa, Blattella germanica
FKVLQLFTGLNYDVP

SEQ ID NO: 1436 - protein, 15 aa, Blattella germanica
TKDIFYNNLTVYYDH

SEQ ID NO: 1437 - protein, 15 aa, Blattella germanica
YIMIMKTPKTIAVSF

SEQ ID NO: 1438 - protein, 15 aa, Blattella germanica
QSKFYETLNPVVQQN

SEQ ID NO: 1439 - protein, 15 aa, Blattella germanica
ETLNPVVQQNLKLSS

SEQ ID NO: 1440 - protein, 15 aa, Blattella germanica
VVQQNLKLSSGKKQK

SEQ ID NO: 1441 - protein, 15 aa, Blattella germanica
HRNVKSHRIRREYTE

SEQ ID NO: 1442 - protein, 15 aa, Blattella germanica
PRRQEYLSKSMALTG

SEQ ID NO: 1443 - protein, 15 aa, Blattella germanica
YLSKSMALTGDATAV

SEQ ID NO: 1444 - protein, 15 aa, Blattella germanica
DATAVVLDMTLKFEG

SEQ ID NO: 1445 - protein, 15 aa, Blattella germanica
PAESYFTTTVSHATS

SEQ ID NO: 1446 - protein, 15 aa, Blattella germanica
FTTTVSHATSLVNGS

SEQ ID NO: 1447 - protein, 15 aa, Blattella germanica
SHATSLVNGSSNYLL

SEQ ID NO: 1448 - protein, 15 aa, Blattella germanica
LVNGSSNYLLFYDQH

SEQ ID NO: 1449 - protein, 15 aa, Blattella germanica
SNYLLFYDQHYYEEK

SEQ ID NO: 1450 - protein, 15 aa, Blattella germanica
KRNQFCLSWSVYKPQ

SEQ ID NO: 1451 - protein, 15 aa, Blattella germanica
CLSWSVYKPQVPIMN

SEQ ID NO: 1452 - protein, 15 aa, Blattella germanica
VYKPQVPIMNIYSAF

SEQ ID NO: 1453 - protein, 15 aa, Blattella germanica
VPIMNIYSAFEFDPN

SEQ ID NO: 1454 - protein, 15 aa, Blattella germanica
IYSAFEFDPNSKVHA

SEQ ID NO: 1455 - protein, 15 aa, Blattella germanica
SKVHAIMNIGKECEN

SEQ ID NO: 1456 - protein, 15 aa, Blattella germanica
GGSAVANIDMLRLSE

SEQ ID NO: 1457 - protein, 15 aa, Blattella germanica
ANIDMLRLSEHLDYV

SEQ ID NO: 1458 - protein, 15 aa, Blattella germanica
LRLSEHLDYVKNLTV

SEQ ID NO: 1459 - protein, 15 aa, Blattella germanica
HLDYVKNLTVSKLCD

SEQ ID NO: 1460 - protein, 15 aa, Blattella germanica
ASDLNRVHVDINYNL

SEQ ID NO: 1461 - protein, 15 aa, Blattella germanica
RVHVDINYNLKQHET

SEQ ID NO: 1462 - protein, 15 aa, Blattella germanica
FKRRVYKVYDFVRTH

SEQ ID NO: 1463 - protein, 15 aa, Blattella germanica
YKVYDFVRTHLYPHV

SEQ ID NO: 1464 - protein, 15 aa, Blattella germanica
FVRTHLYPHVSEDVI

SEQ ID NO: 1465 - protein, 15 aa, Blattella germanica
SEDVIVDNPAQFISA

SEQ ID NO: 1466 - protein, 15 aa, Blattella germanica
VDNPAQFISANFTLK

SEQ ID NO: 1467 - protein, 15 aa, Blattella germanica
QFISANFTLKDNTRA

SEQ ID NO: 1468 - protein, 15 aa, Blattella germanica
NFTLKDNTRAFNVSI

SEQ ID NO: 1469 - protein, 15 aa, Blattella germanica
DNTRAFNVSIKTPVL

SEQ ID NO: 1470 - protein, 15 aa, Blattella germanica
FNVSIKTPVLSVNAT

SEQ ID NO: 1471 - protein, 15 aa, Blattella germanica
KTPVLSVNATVVRLQ

SEQ ID NO: 1472 - protein, 15 aa, Blattella germanica
ETPVLSVNATSVRLQ

SEQ ID NO: 1473 - protein, 15 aa, Blattella germanica
SVNATVVRLQSWQSE

SEQ ID NO: 1474 - protein, 15 aa, Blattella germanica
VVRLQSWQSEMLRMN

SEQ ID NO: 1475 - protein, 15 aa, Blattella germanica
SWQSEMLRMNPRTSF

SEQ ID NO: 1476 - protein, 15 aa, Blattella germanica
MLRMNPRTSFAKRFA

SEQ ID NO: 1477 - protein, 15 aa, Blattella germanica
AKRFAKWALPLYNKP

SEQ ID NO: 1478 - protein, 15 aa, Blattella germanica
SSYINTFDNFTYSAH

SEQ ID NO: 1479 - protein, 15 aa, Blattella germanica
TFDNFTYSAHHIVQN

SEQ ID NO: 1480 - protein, 15 aa, Blattella germanica
TYSAHHIVQNDAFYT

SEQ ID NO: 1481 - protein, 15 aa, Blattella germanica
HIVQNDAFYTILDIP

SEQ ID NO: 1482 - protein, 15 aa, Blattella germanica
DAFYTILDIPQKFNM

SEQ ID NO: 1483 - protein, 15 aa, Blattella germanica
QKFNMEYFKVAFKPT

SEQ ID NO: 1484 - protein, 15 aa, Blattella germanica
EYFKVAFKPTSPVPN

SEQ ID NO: 1485 - protein, 15 aa, Blattella germanica
MQREVLVFLRNAKIE

SEQ ID NO: 1486 - protein, 15 aa, Blattella germanica
LVFLRNAKIELKPNQ

SEQ ID NO: 1487 - protein, 15 aa, Blattella germanica
DLNVSQDRIGYVYAF

SEQ ID NO: 1488 - protein, 15 aa, Blattella germanica
QDRIGYVYALPTKAA

SEQ ID NO: 1489 - protein, 15 aa, Blattella germanica
YVYALPTKAAHIVFP

SEQ ID NO: 1490 - protein, 15 aa, Blattella germanica
HIVFPSYEIEMFYDG

SEQ ID NO: 1491 - protein, 15 aa, Blattella germanica
SYEIEMFYDGSRIMI

SEQ ID NO: 1492 - protein, 15 aa, Blattella germanica
MFYDGSRIMIQASNM

SEQ ID NO: 1493 - protein, 15 aa, Blattella germanica
SRIMIQASNMYRNFT

SEQ ID NO: 1494 - protein, 15 aa, Blattella germanica
QASNMYRNFTKGLLW

SEQ ID NO: 1495 - protein, 15 aa, Blattella germanica
LTPWGCYAKDMALFV

SEQ ID NO: 1496 - protein, 15 aa, Blattella germanica
CYAKDMALFVASYAD

SEQ ID NO: 1497 - protein, 15 aa, Blattella germanica
MALFVASYADNSNSE

SEQ ID NO: 1498 - protein, 15 aa, Blattella germanica
LVSHQMRLSQVIKLA

SEQ ID NO: 1499 - protein, 15 aa, Blattella germanica
GVLVFTKENFKKGVS

SEQ ID NO: 1500 - protein, 15 aa, Blattella germanica
DNEFVLVEFYAPWCG

SEQ ID NO: 1501 - protein, 15 aa, Blattella germanica
PTLKFFRSGSPIDYS

SEQ ID NO: 1502 - protein, 15 aa, Blattella germanica
DEIVSWLLKKTGPVA

SEQ ID NO: 1503 - protein, 15 aa, Blattella germanica
VDDAKSFIDASNVAI

SEQ ID NO: 1504 - protein, 15 aa, Blattella germanica
SFIDASNVAIIGFFK

SEQ ID NO: 1505 - protein, 15 aa, Blattella germanica
AAKNFLAAANAIDDY

SEQ ID NO: 1506 - protein, 15 aa, Blattella germanica
PQIEVTFEIDANGIL

SEQ ID NO: 1507 - protein, 15 aa, Blattella germanica
TFEIDANGILQVSAE

SEQ ID NO: 1508 - protein, 15 aa, Blattella germanica
LESYAYSLKNQLADK

SEQ ID NO: 1509 - protein, 15 aa, Blattella germanica
KKELEDIVQPIIAKL

SEQ ID NO: 1510 - protein, 15 aa, Blattella germanica
DIVQPIIAKLYQGAG

SEQ ID NO: 1511 - protein, 15 aa, Blattella germanica
LELGALLTAMAMVTA

SEQ ID NO: 1512 - protein, 15 aa, Blattella germanica
LLTAMAMVTAKLATV

SEQ ID NO: 1513 - protein, 15 aa, Blattella germanica
STDSTLVYKIQPVNN

SEQ ID NO: 1514 - protein, 15 aa, Blattella germanica
LVYKIQPVNNAHGGG

SEQ ID NO: 1515 - protein, 15 aa, Blattella germanica
ASYFKSNCPDAYSYA

SEQ ID NO: 1516 - protein, 15 aa, Blattella germanica
SSLEVFFQQQRILLR

SEQ ID NO: 1517 - protein, 15 aa, Blattella germanica
FFQQQRILLRLHRCF

SEQ ID NO: 1518 - protein, 15 aa, Blattella germanica
RILLRLHRCFQVLGR

SEQ ID NO: 1519 - protein, 15 aa, Blattella germanica
WGGDVAFVKHLTALE

SEQ ID NO: 1520 - protein, 15 aa, Blattella germanica
AFVKHLTALENTDGH

SEQ ID NO: 1521 - protein, 15 aa, Blattella germanica
NQLNEIRHAILAAGD

SEQ ID NO: 1522 - protein, 15 aa, Blattella germanica
IRHAILAAGDLYSRR

SEQ ID NO: 1523 - protein, 15 aa, Blattella germanica
DGTKDLLFKNSATGL

SEQ ID NO: 1524 - protein, 15 aa, Blattella germanica
KDLLFKNSATGLLSV

SEQ ID NO: 1525 - protein, 15 aa, Blattella germanica
KHCLQMASNTMPYQI

SEQ ID NO: 1526 - protein, 15 aa, Blattella germanica
MPYQIASGFSTSQLA

SEQ ID NO: 1527 - protein, 15 aa, Blattella germanica
ASGFSTSQLAMIQNA

SEQ ID NO: 1528 - protein, 15 aa, Blattella germanica
TSQLAMIQNAIDEYH

SEQ ID NO: 1529 - protein, 15 aa, Blattella germanica
ERDDYVTIHWENIQS

SEQ ID NO: 1530 - protein, 15 aa, Blattella germanica
YGKIIKRLEAKGFKL

SEQ ID NO: 1531 - protein, 15 aa, Blattella germanica
KGFKLVAMKFVWADE

SEQ ID NO: 1532 - protein, 15 aa, Blattella germanica
VAMKFVWADEELLKK

SEQ ID NO: 1533 - protein, 15 aa, Blattella germanica
FPGLVKYMSSGPVVP

SEQ ID NO: 1534 - protein, 15 aa, Blattella germanica
MVWEGLNVVKTGRLM

SEQ ID NO: 1535 - protein, 15 aa, Blattella germanica
LNVVKTGRLMLGATD

SEQ ID NO: 1536 - protein, 15 aa, Blattella germanica
STRMELQHLQSIEVF

SEQ ID NO: 1537 - protein, 15 aa, Blattella germanica
LQHLQSIEVFPEDEG

SEQ ID NO: 1538 - protein, 15 aa, Blattella germanica
ILSCRIIGAQKFDVV

SEQ ID NO: 1539 - protein, 15 aa, Blattella germanica
SKDFQYTNEANIYKL

SEQ ID NO: 1540 - protein, 15 aa, Blattella germanica
YTNEANIYKLNIAEI

SEQ ID NO: 1541 - protein, 15 aa, Blattella germanica
NIYKLNIAEIFPEDS

SEQ ID NO: 1542 - protein, 15 aa, Blattella germanica
LILATAALAVAYPSP

SEQ ID NO: 1543 - protein, 15 aa, Blattella germanica
ILATAALAVAYPSPG

SEQ ID NO: 1544 - protein, 15 aa, Blattella germanica
QDYKVLADKTYLTRQ

SEQ ID NO: 1545 - protein, 15 aa, Blattella germanica
LADKTYLTRQRDLLK

SEQ ID NO: 1546 - protein, 15 aa, Blattella germanica
YLTRQRDLLKLLVRI

SEQ ID NO: 1547 - protein, 15 aa, Blattella germanica
RDLLKLLVRIQQPNY

SEQ ID NO: 1548 - protein, 15 aa, Blattella germanica
LLVRIQQPNYYADQY

SEQ ID NO: 1549 - protein, 15 aa, Blattella germanica
YADQYEIGQSYDIEA

SEQ ID NO: 1550 - protein, 15 aa, Blattella germanica
YDIEANINNYKYPYV

SEQ ID NO: 1551 - protein, 15 aa, Blattella germanica
NINNYKYPYVVKNFV

SEQ ID NO: 1552 - protein, 15 aa, Blattella germanica
KYPYVVKNFVAAYKN

SEQ ID NO: 1553 - protein, 15 aa, Blattella germanica
VKNFVAAYKNGMLAR

SEQ ID NO: 1554 - protein, 15 aa, Blattella germanica
PYYTTQSYETKLLFD

SEQ ID NO: 1555 - protein, 15 aa, Blattella germanica
QSYETKLLFDLFYYA

SEQ ID NO: 1556 - protein, 15 aa, Blattella germanica
KLLFDLFYYANDYDT

SEQ ID NO: 1557 - protein, 15 aa, Blattella germanica
LFYYANDYDTFYKTA

SEQ ID NO: 1558 - protein, 15 aa, Blattella germanica
HINEGQFLYALSSAL

SEQ ID NO: 1559 - protein, 15 aa, Blattella germanica
QFLYALSSALFQRED

SEQ ID NO: 1560 - protein, 15 aa, Blattella germanica
LNDYILPAPYEIYPW

SEQ ID NO: 1561 - protein, 15 aa, Blattella germanica
EIYPWLFVDSDVIQR

SEQ ID NO: 1562 - protein, 15 aa, Blattella germanica
LFVDSDVIQRAYETR

SEQ ID NO: 1563 - protein, 15 aa, Blattella germanica
DVIQRAYETRMSDVH

SEQ ID NO: 1564 - protein, 15 aa, Blattella germanica
MSDVHLTAPKTYIFP

SEQ ID NO: 1565 - protein, 15 aa, Blattella germanica
LTAPKTYIFPVNYTV

SEQ ID NO: 1566 - protein, 15 aa, Blattella germanica
TYIFPVNYTVHTPEQ

SEQ ID NO: 1567 - protein, 15 aa, Blattella germanica
ELNYFYHDVGLNTYY

SEQ ID NO: 1568 - protein, 15 aa, Blattella germanica
YHDVGLNTYYSYYYF

SEQ ID NO: 1569 - protein, 15 aa, Blattella germanica
LNTYYSYYYFNYPTF

SEQ ID NO: 1570 - protein, 15 aa, Blattella germanica
SYYYFNYPTFFNSTE

SEQ ID NO: 1571 - protein, 15 aa, Blattella germanica
NYPTFFNSTEYGVQF

SEQ ID NO: 1572 - protein, 15 aa, Blattella germanica
DRRGEMFYYTRQQLY

SEQ ID NO: 1573 - protein, 15 aa, Blattella germanica
PRHGEQFYYFYQQIY

SEQ ID NO: 1574 - protein, 15 aa, Blattella germanica
MFYYTRQQLYARYFL

SEQ ID NO: 1575 - protein, 15 aa, Blattella germanica
QFYYFYQQIYARYML

SEQ ID NO: 1576 - protein, 15 aa, Blattella germanica
RQQLYARYFLERLSN

SEQ ID NO: 1577 - protein, 15 aa, Blattella germanica
YQQIYARYMLERYSN

SEQ ID NO: 1578 - protein, 15 aa, Blattella germanica
ARYFLERLSNDLPDV

SEQ ID NO: 1579 - protein, 15 aa, Blattella germanica
EPLHYDRPFQTEYNP

SEQ ID NO: 1580 - protein, 15 aa, Blattella germanica
KPFTYNKAFKTPYNP

SEQ ID NO: 1581 - protein, 15 aa, Blattella germanica
DRPFQTEYNPQLRYP

SEQ ID NO: 1582 - protein, 15 aa, Blattella germanica
NKAFKTPYNPQLRYP

SEQ ID NO: 1583 - protein, 15 aa, Blattella germanica
PVRPYEYSRRSLYYS

SEQ ID NO: 1584 - protein, 15 aa, Blattella germanica
PARPAYMVPQDFDLY

SEQ ID NO: 1585 - protein, 15 aa, Blattella germanica
EYSRRSLYYSNGYSH

SEQ ID NO: 1586 - protein, 15 aa, Blattella germanica
SLYYSNGYSHYYGNY

SEQ ID NO: 1587 - protein, 15 aa, Blattella germanica
NYYTGDYHPSYYYGY

SEQ ID NO: 1588 - protein, 15 aa, Blattella germanica
DYHPSYYYGYATQYD

SEQ ID NO: 1589 - protein, 15 aa, Blattella germanica
YYYGYATQYDYYYPE

SEQ ID NO: 1590 - protein, 15 aa, Blattella germanica
ATQYDYYYPEDLQSY

SEQ ID NO: 1591 - protein, 15 aa, Blattella germanica
YYYPEDLQSYERRVR

SEQ ID NO: 1592 - protein, 15 aa, Blattella germanica
GYFFGFQGEKYPLYE

SEQ ID NO: 1593 - protein, 15 aa, Blattella germanica
FQGEKYPLYENYIKG

SEQ ID NO: 1594 - protein, 15 aa, Blattella germanica
YPLYENYIKGIDYLG

SEQ ID NO: 1595 - protein, 15 aa, Blattella germanica
NQRFYGSIYHYYRQL

SEQ ID NO: 1596 - protein, 15 aa, Blattella germanica
GSIYHYYRQLAGKSV

SEQ ID NO: 1597 - protein, 15 aa, Blattella germanica
YYRQLAGKSVDPYNN

SEQ ID NO: 1598 - protein, 15 aa, Blattella germanica
DPYNNYGLAPSALQN

SEQ ID NO: 1599 - protein, 15 aa, Blattella germanica
YGLAPSALQNIYTTL

SEQ ID NO: 1600 - protein, 15 aa, Blattella germanica
SALQNIYTTLRDPAN

SEQ ID NO: 1601 - protein, 15 aa, Blattella germanica
RDPANWQILKRVNYL

SEQ ID NO: 1602 - protein, 15 aa, Blattella germanica
WQILKRVNYLFQRYK

SEQ ID NO: 1603 - protein, 15 aa, Blattella germanica
RVNYLFQRYKGYLPR

SEQ ID NO: 1604 - protein, 15 aa, Blattella germanica
EHFDVDLDNVVNVKV

SEQ ID NO: 1605 - protein, 15 aa, Blattella germanica
AEDGKYIDYRARQTR

SEQ ID NO: 1606 - protein, 15 aa, Blattella germanica
YIDYRARQTRLNHKP

SEQ ID NO: 1607 - protein, 15 aa, Blattella germanica
QATDAYVRVFLGPKY

SEQ ID NO: 1608 - protein, 15 aa, Blattella germanica
YVRVFLGPKYDYLHS

SEQ ID NO: 1609 - protein, 15 aa, Blattella germanica
DRRHYFVEIDRFPYK

SEQ ID NO: 1610 - protein, 15 aa, Blattella germanica
FVEIDRFPYKVQAGK

SEQ ID NO: 1611 - protein, 15 aa, Blattella germanica
RFPYKVQAGKTTITR

SEQ ID NO: 1612 - protein, 15 aa, Blattella germanica
SVVSPDYQSYRTLMR

SEQ ID NO: 1613 - protein, 15 aa, Blattella germanica
DYQSYRTLMRKVYDA

SEQ ID NO: 1614 - protein, 15 aa, Blattella germanica
RTLMRKVYDAYEGKD

SEQ ID NO: 1615 - protein, 15 aa, Blattella germanica
YEGKDQFYYDKSEQY

SEQ ID NO: 1616 - protein, 15 aa, Blattella germanica
QFYYDKSEQYCGYPE

SEQ ID NO: 1617 - protein, 15 aa, Blattella germanica
GQEYTFYVIVTPYAK

SEQ ID NO: 1618 - protein, 15 aa, Blattella germanica
FYVIVTPYAKQDDHD

SEQ ID NO: 1619 - protein, 15 aa, Blattella germanica
YKSFSYCGVGANHRI

SEQ ID NO: 1620 - protein, 15 aa, Blattella germanica
SHDFVTPNMYFKDVV

SEQ ID NO: 1621 - protein, 15 aa, Blattella germanica
TPNMYFKDVVIYHKK

SEQ ID NO: 1622 - protein, 15 aa, Blattella germanica
FSNMDIKGKNALVTG

SEQ ID NO: 1623 - protein, 15 aa, Blattella germanica
AATGIGLEYVKQLLE

SEQ ID NO: 1624 - protein, 15 aa, Blattella germanica
GLEYVKQLLENGAQH

SEQ ID NO: 1625 - protein, 15 aa, Blattella germanica
KQLLENGAQHVAVCD

SEQ ID NO: 1626 - protein, 15 aa, Blattella germanica
KELVEKYGKGKAIFI

SEQ ID NO: 1627 - protein, 15 aa, Blattella germanica
KAIFIKCDVTNIPEF

SEQ ID NO: 1628 - protein, 15 aa, Blattella germanica
EDAFKKAYNAFKSLD

SEQ ID NO: 1629 - protein, 15 aa, Blattella germanica
KAYNAFKSLDIVINN

SEQ ID NO: 1630 - protein, 15 aa, Blattella germanica
FKSLDIVINNAGILN

SEQ ID NO: 1631 - protein, 15 aa, Blattella germanica
IVINNAGILNDEKWE

SEQ ID NO: 1632 - protein, 15 aa, Blattella germanica
DEKWELQIAINVNGV

SEQ ID NO: 1633 - protein, 15 aa, Blattella germanica
LQIAINVNGVVRGTL

SEQ ID NO: 1634 - protein, 15 aa, Blattella germanica
GGKGGVIVNIASILG

SEQ ID NO: 1635 - protein, 15 aa, Blattella germanica
VIVNIASILGLQNMA

SEQ ID NO: 1636 - protein, 15 aa, Blattella germanica
ASILGLQNMAGCPVY

SEQ ID NO: 1637 - protein, 15 aa, Blattella germanica
GCPVYVGTKHAVVGI

SEQ ID NO: 1638 - protein, 15 aa, Blattella germanica
AVVGISRSFGMPFHF

SEQ ID NO: 1639 - protein, 15 aa, Blattella germanica
MPFHFDRTGVRVLTM

SEQ ID NO: 1640 - protein, 15 aa, Blattella germanica
DRTGVRVLTMCPGVT

SEQ ID NO: 1641 - protein, 15 aa, Blattella germanica
AKGMMHMIKKGANGS

SEQ ID NO: 1642 - protein, 15 aa, Blattella germanica
GNKPVYEVAIPDRLT

SEQ ID NO: 1643 - protein, 15 aa, Blattella germanica
VYEVAIPDRLTLRVE

SEQ ID NO: 1644 - protein, 15 aa, Blattella germanica
AGVLWVCATGMARQV

SEQ ID NO: 1645 - protein, 15 aa, Blattella germanica
QTLFLLLLLLAAVSA

SEQ ID NO: 1646 - protein, 15 aa, Blattella germanica
LLLLLAAVSASQQCK

SEQ ID NO: 1647 - protein, 15 aa, Blattella germanica
AGNTYVYSFEGGTTT

SEQ ID NO: 1648 - protein, 15 aa, Blattella germanica
QGDGVKLHLKAKAEV

SEQ ID NO: 1649 - protein, 15 aa, Blattella germanica
THLNDLESHPVSFSF

SEQ ID NO: 1650 - protein, 15 aa, Blattella germanica
SEASLNLKRAILAHF

SEQ ID NO: 1651 - protein, 15 aa, Blattella germanica
NLKRAILAHFQVAPQ

SEQ ID NO: 1652 - protein, 15 aa, Blattella germanica
ILAHFQVAPQETARS

SEQ ID NO: 1653 - protein, 15 aa, Blattella germanica
RGGTTTITKSRNLNK

SEQ ID NO: 1654 - protein, 15 aa, Blattella germanica
CHLREHLRQDFASVT

SEQ ID NO: 1655 - protein, 15 aa, Blattella germanica
HLRQDFASVTYHVES

SEQ ID NO: 1656 - protein, 15 aa, Blattella germanica
FASVTYHVESDLQNS

SEQ ID NO: 1657 - protein, 15 aa, Blattella germanica
TQEFKHQLQGGVLRV

SEQ ID NO: 1658 - protein, 15 aa, Blattella germanica
KYLYRPFANQDAGAK

SEQ ID NO: 1659 - protein, 15 aa, Blattella germanica
DAGAKTVVDSKLTYV

SEQ ID NO: 1660 - protein, 15 aa, Blattella germanica
QSIIFHPPNVHPGSG

SEQ ID NO: 1661 - protein, 15 aa, Blattella germanica
KEFANVVRVVRHTSK

SEQ ID NO: 1662 - protein, 15 aa, Blattella germanica
VVRVVRHTSKNDLLS

SEQ ID NO: 1663 - protein, 15 aa, Blattella germanica
NDLLSVYNQVKSGAG

SEQ ID NO: 1664 - protein, 15 aa, Blattella germanica
FKDKSAGTKMFLDAL

SEQ ID NO: 1665 - protein, 15 aa, Blattella germanica
AGTKMFLDALFRAGT

SEQ ID NO: 1666 - protein, 15 aa, Blattella germanica
VAVELLKSNKITGPH

SEQ ID NO: 1667 - protein, 15 aa, Blattella germanica
AEFYYLQLAYTRHVT

SEQ ID NO: 1668 - protein, 15 aa, Blattella germanica
LQLAYTRHVTKAALL

SEQ ID NO: 1669 - protein, 15 aa, Blattella germanica
TRHVTKAALLAAVTL

SEQ ID NO: 1670 - protein, 15 aa, Blattella germanica
KAALLAAVTLLEQPN

SEQ ID NO: 1671 - protein, 15 aa, Blattella germanica
AAVTLLEQPNPSKLA

SEQ ID NO: 1672 - protein, 15 aa, Blattella germanica
AEVDEFLEKLSLLLN

SEQ ID NO: 1673 - protein, 15 aa, Blattella germanica
FLEKLSLLLNGGCKV

SEQ ID NO: 1674 - protein, 15 aa, Blattella germanica
SLLLNGGCKVSNYDE

SEQ ID NO: 1675 - protein, 15 aa, Blattella germanica
SNYDEEVKIVATLKA

SEQ ID NO: 1676 - protein, 15 aa, Blattella germanica
EVKIVATLKALQNAH

SEQ ID NO: 1677 - protein, 15 aa, Blattella germanica
ATLKALQNAHHLNDA

SEQ ID NO: 1678 - protein, 15 aa, Blattella germanica
HLNDAVTSKLQTCLL

SEQ ID NO: 1679 - protein, 15 aa, Blattella germanica
DDGVPTRIRSAVLDV

SEQ ID NO: 1680 - protein, 15 aa, Blattella germanica
CKAKDISLEVLKNYQ

SEQ ID NO: 1681 - protein, 15 aa, Blattella germanica
ISLEVLKNYQLDSEL

SEQ ID NO: 1682 - protein, 15 aa, Blattella germanica
LKNYQLDSELRIKAF

SEQ ID NO: 1683 - protein, 15 aa, Blattella germanica
LDSELRIKAFLALVE

SEQ ID NO: 1684 - protein, 15 aa, Blattella germanica
RIKAFLALVECPCNK

SEQ ID NO: 1685 - protein, 15 aa, Blattella germanica
KELLDKEPSYQVGSF

SEQ ID NO: 1686 - protein, 15 aa, Blattella germanica
KEPSYQVGSFIVSYL

SEQ ID NO: 1687 - protein, 15 aa, Blattella germanica
QVGSFIVSYLRNLRA

SEQ ID NO: 1688 - protein, 15 aa, Blattella germanica
IVSYLRNLRASANPS

SEQ ID NO: 1689 - protein, 15 aa, Blattella germanica
RNLRASANPSKEKQK

SEQ ID NO: 1690 - protein, 15 aa, Blattella germanica
AVFGEIRTTKRFPID

SEQ ID NO: 1691 - protein, 15 aa, Blattella germanica
IRTTKRFPIDFRKFS

SEQ ID NO: 1692 - protein, 15 aa, Blattella germanica
RFPIDFRKFSNNFEF

SEQ ID NO: 1693 - protein, 15 aa, Blattella germanica
FRKFSNNFEFSYLLG

SEQ ID NO: 1694 - protein, 15 aa, Blattella germanica
NNFEFSYLLGGANVG

SEQ ID NO: 1695 - protein, 15 aa, Blattella germanica
TTVESNVIYSQNSFL

SEQ ID NO: 1696 - protein, 15 aa, Blattella germanica
NVIYSQNSFLPRATT

SEQ ID NO: 1697 - protein, 15 aa, Blattella germanica
LNLTTEFFGHSVNLL

SEQ ID NO: 1698 - protein, 15 aa, Blattella germanica
EFFGHSVNLLEVELR

SEQ ID NO: 1699 - protein, 15 aa, Blattella germanica
GYFNTHTAAEVVQKG

SEQ ID NO: 1700 - protein, 15 aa, Blattella germanica
DVENTAKQRFNHAIR

SEQ ID NO: 1701 - protein, 15 aa, Blattella germanica
AKQRFNHAIRGKRSV

SEQ ID NO: 1702 - protein, 15 aa, Blattella germanica
NHAIRGKRSVTKEQL

SEQ ID NO: 1703 - protein, 15 aa, Blattella germanica
TKEQLELVKSKSVSP

SEQ ID NO: 1704 - protein, 15 aa, Blattella germanica
ELVKSKSVSPYHSET

SEQ ID NO: 1705 - protein, 15 aa, Blattella germanica
DRELLLELSTRLFGA

SEQ ID NO: 1706 - protein, 15 aa, Blattella germanica
RLFGAEVGWLALHHN

SEQ ID NO: 1707 - protein, 15 aa, Blattella germanica
EVGWLALHHNARDAA

SEQ ID NO: 1708 - protein, 15 aa, Blattella germanica
TTFNLLDKVMKKAKD

SEQ ID NO: 1709 - protein, 15 aa, Blattella germanica
FDYKLRQHNTFLDTE

SEQ ID NO: 1710 - protein, 15 aa, Blattella germanica
FLDTELVYPTSLGFP

SEQ ID NO: 1711 - protein, 15 aa, Blattella germanica
LVYPTSLGFPLKLVL

SEQ ID NO: 1712 - protein, 15 aa, Blattella germanica
SLGFPLKLVLAGSSA

SEQ ID NO: 1713 - protein, 15 aa, Blattella germanica
LKLVLAGSSAVHVEL

SEQ ID NO: 1714 - protein, 15 aa, Blattella germanica
VHDLVHNLKNSHVHF

SEQ ID NO: 1715 - protein, 15 aa, Blattella germanica
HNLKNSHVHFRFVPS

SEQ ID NO: 1716 - protein, 15 aa, Blattella germanica
SHVHFRFVPSAAVEF

SEQ ID NO: 1717 - protein, 15 aa, Blattella germanica
RFVPSAAVEFVGAFV

SEQ ID NO: 1718 - protein, 15 aa, Blattella germanica
AAVEFVGAFVVDAYA

SEQ ID NO: 1719 - protein, 15 aa, Blattella germanica
VGAFVVDAYAVEAGL

SEQ ID NO: 1720 - protein, 15 aa, Blattella germanica
VDAYAVEAGLKVAAT

SEQ ID NO: 1721 - protein, 15 aa, Blattella germanica
VEAGLKVAATLHTAT

SEQ ID NO: 1722 - protein, 15 aa, Blattella germanica
KVAATLHTATGSDIT

SEQ ID NO: 1723 - protein, 15 aa, Blattella germanica
DVGVDVTVGLPVQKQ

SEQ ID NO: 1724 - protein, 15 aa, Blattella germanica
PVQKQDIVTLKTEVL

SEQ ID NO: 1725 - protein, 15 aa, Blattella germanica
DIVTLKTEVLTTVQE

SEQ ID NO: 1726 - protein, 15 aa, Blattella germanica
HGCFDQLSPLVGLTF

SEQ ID NO: 1727 - protein, 15 aa, Blattella germanica
VGLTFCTTMSFPWDP

SEQ ID NO: 1728 - protein, 15 aa, Blattella germanica
FPWDPVASKAAFYPL

SEQ ID NO: 1729 - protein, 15 aa, Blattella germanica
AFYPLNGPSKFSLVV

SEQ ID NO: 1730 - protein, 15 aa, Blattella germanica
TSYHFRASLNKADPH

SEQ ID NO: 1731 - protein, 15 aa, Blattella germanica
KKSLELLLETPGSKT

SEQ ID NO: 1732 - protein, 15 aa, Blattella germanica
ERKLGLILERTYDPY

SEQ ID NO: 1733 - protein, 15 aa, Blattella germanica
TYDPYHGVKAQLNSP

SEQ ID NO: 1734 - protein, 15 aa, Blattella germanica
HGVKAQLNSPWKQVS

SEQ ID NO: 1735 - protein, 15 aa, Blattella germanica
QLNSPWKQVSAELAF

SEQ ID NO: 1736 - protein, 15 aa, Blattella germanica
DEQEYYVKLGASVTG

SEQ ID NO: 1737 - protein, 15 aa, Blattella germanica
THQFNVAGSVTVDKT

SEQ ID NO: 1738 - protein, 15 aa, Blattella germanica
TDLKVYYGENHVVLK

SEQ ID NO: 1739 - protein, 15 aa, Blattella germanica
YYGENHVVLKSGFKR

SEQ ID NO: 1740 - protein, 15 aa, Blattella germanica
HVVLKSGFKRPSANN

SEQ ID NO: 1741 - protein, 15 aa, Blattella germanica
QYPDFGVNLIWNHKR

SEQ ID NO: 1742 - protein, 15 aa, Blattella germanica
GVNLIWNHKRDKNNF

SEQ ID NO: 1743 - protein, 15 aa, Blattella germanica
DKNNFGNSLAVVHGR

SEQ ID NO: 1744 - protein, 15 aa, Blattella germanica
EARFTLNQEAHYQFD

SEQ ID NO: 1745 - protein, 15 aa, Blattella germanica
LNQEAHYQFDSIHKF

SEQ ID NO: 1746 - protein, 15 aa, Blattella germanica
HYQFDSIHKFEFASK

SEQ ID NO: 1747 - protein, 15 aa, Blattella germanica
SIHKFEFASKNKVTY

SEQ ID NO: 1748 - protein, 15 aa, Blattella germanica
EFASKNKVTYPLLGI

SEQ ID NO: 1749 - protein, 15 aa, Blattella germanica
PLLGIIGKLDASVQP

SEQ ID NO: 1750 - protein, 15 aa, Blattella germanica
KTFHLDVEASYEKHK

SEQ ID NO: 1751 - protein, 15 aa, Blattella germanica
RVIVSEGKSKFTTEL

SEQ ID NO: 1752 - protein, 15 aa, Blattella germanica
NNIDFQIDAEAKIHG

SEQ ID NO: 1753 - protein, 15 aa, Blattella germanica
QPDPYKLDSGLVYNP

SEQ ID NO: 1754 - protein, 15 aa, Blattella germanica
KLDSGLVYNPQLFDA

SEQ ID NO: 1755 - protein, 15 aa, Blattella germanica
KVFLKNYLVGNAQFK

SEQ ID NO: 1756 - protein, 15 aa, Blattella germanica
NYLVGNAQFKYTNGE

SEQ ID NO: 1757 - protein, 15 aa, Blattella germanica
GSATLNVDVPKLGRK

SEQ ID NO: 1758 - protein, 15 aa, Blattella germanica
DLHVKGSQHVATVEL

SEQ ID NO: 1759 - protein, 15 aa, Blattella germanica
GSQHVATVELYYNAE

SEQ ID NO: 1760 - protein, 15 aa, Blattella germanica
ATVELYYNAEKKLAF

SEQ ID NO: 1761 - protein, 15 aa, Blattella germanica
YYNAEKKLAFHTDTD

SEQ ID NO: 1762 - protein, 15 aa, Blattella germanica
KKLAFHTDTDLKKDS

SEQ ID NO: 1763 - protein, 15 aa, Blattella germanica
LDSKNVLSILNYKTE

SEQ ID NO: 1764 - protein, 15 aa, Blattella germanica
VLSILNYKTEVNVKG

SEQ ID NO: 1765 - protein, 15 aa, Blattella germanica
YTGPFSVDNVLEFKL

SEQ ID NO: 1766 - protein, 15 aa, Blattella germanica
KKLQFTYSESLDLDD

SEQ ID NO: 1767 - protein, 15 aa, Blattella germanica
SSGKASYESFQNFRV

SEQ ID NO: 1768 - protein, 15 aa, Blattella germanica
SYESFQNFRVEADIE

SEQ ID NO: 1769 - protein, 15 aa, Blattella germanica
LKKWHVLLANKPQAK

SEQ ID NO: 1770 - protein, 15 aa, Blattella germanica
LKADVFFNKFNPTDN

SEQ ID NO: 1771 - protein, 15 aa, Blattella germanica
RQPLSFDHAVELKLL

SEQ ID NO: 1772 - protein, 15 aa, Blattella germanica
TYNFHSYLNEKALGV

SEQ ID NO: 1773 - protein, 15 aa, Blattella germanica
KALGVILTLPQRIIA

SEQ ID NO: 1774 - protein, 15 aa, Blattella germanica
KAAVHLLVAVKASKE

SEQ ID NO: 1775 - protein, 15 aa, Blattella germanica
DGASYISTLAYQDEK

SEQ ID NO: 1776 - protein, 15 aa, Blattella germanica
AQIQVVIHLDEQYIY

SEQ ID NO: 1777 - protein, 15 aa, Blattella germanica
EQYIYVKSPTAELIK

SEQ ID NO: 1778 - protein, 15 aa, Blattella germanica
SKAVYYKKILPTRSS

SEQ ID NO: 1779 - protein, 15 aa, Blattella germanica
YKKILPTRSSPLISC

SEQ ID NO: 1780 - protein, 15 aa, Blattella germanica
IESIRKQTAIEIEQL

SEQ ID NO: 1781 - protein, 15 aa, Blattella germanica
KQTAIEIEQLNARVV

SEQ ID NO: 1782 - protein, 15 aa, Blattella germanica
KLQIQITELEMSLDV

SEQ ID NO: 1783 - protein, 15 aa, Blattella germanica
TIKKQSLTLTEIQAH

SEQ ID NO: 1784 - protein, 15 aa, Blattella germanica
GIAQRKLQSVTAELE

SEQ ID NO: 1785 - protein, 15 aa, Blattella germanica
RVNELTTINVNLASA

SEQ ID NO: 1786 - protein, 15 aa, Blattella germanica
TTINVNLASAKSKVE

SEQ ID NO: 1787 - protein, 15 aa, Blattella germanica
EQERIVKIEAIKKSL

SEQ ID NO: 1788 - protein, 15 aa, Blattella germanica
LSLIRAKHRTFVTTS

SEQ ID NO: 1789 - protein, 15 aa, Blattella germanica
PQKFKVVFDTGSSNL

SEQ ID NO: 1790 - protein, 15 aa, Blattella germanica
VVFDTGSSNLWVPSK

SEQ ID NO: 1791 - protein, 15 aa, Blattella germanica
WVPSKKCHLTNIACL

SEQ ID NO: 1792 - protein, 15 aa, Blattella germanica
KCHLTNIACLLHNKY

SEQ ID NO: 1793 - protein, 15 aa, Blattella germanica
NIACLLHNKYDSTKS

SEQ ID NO: 1794 - protein, 15 aa, Blattella germanica
NGTSFAIQYGSGSLS

SEQ ID NO: 1795 - protein, 15 aa, Blattella germanica
SGSLSGFLSTDVLDI

SEQ ID NO: 1796 - protein, 15 aa, Blattella germanica
GFLSTDVLDIGGLKV

SEQ ID NO: 1797 - protein, 15 aa, Blattella germanica
DVLDIGGLKVQKQTF

SEQ ID NO: 1798 - protein, 15 aa, Blattella germanica
EPGLAFVAAKFDGIL

SEQ ID NO: 1799 - protein, 15 aa, Blattella germanica
FVAAKFDGILGMAYS

SEQ ID NO: 1800 - protein, 15 aa, Blattella germanica
FDGILGMAYSTISVD

SEQ ID NO: 1801 - protein, 15 aa, Blattella germanica
TISVDGVTPVFYNMV

SEQ ID NO: 1802 - protein, 15 aa, Blattella germanica
GVTPVFYNMVKQGLV

SEQ ID NO: 1803 - protein, 15 aa, Blattella germanica
FYNMVKQGLVSQPIF

SEQ ID NO: 1804 - protein, 15 aa, Blattella germanica
KQGLVSQPIFSFYLS

SEQ ID NO: 1805 - protein, 15 aa, Blattella germanica
SQPIFSFYLSRDPGA

SEQ ID NO: 1806 - protein, 15 aa, Blattella germanica
SDPNHYKGDFTYLSV

SEQ ID NO: 1807 - protein, 15 aa, Blattella germanica
YKGDFTYLSVDRKMY

SEQ ID NO: 1808 - protein, 15 aa, Blattella germanica
TYLSVDRKMYWQFKM

SEQ ID NO: 1809 - protein, 15 aa, Blattella germanica
DRKMYWQFKMDKIQI

SEQ ID NO: 1810 - protein, 15 aa, Blattella germanica
WQFKMDKIQIGNGSF

SEQ ID NO: 1811 - protein, 15 aa, Blattella germanica
IAGPVSEVTALNRQI

SEQ ID NO: 1812 - protein, 15 aa, Blattella germanica
SEVTALNRQIGGTPI

SEQ ID NO: 1813 - protein, 15 aa, Blattella germanica
ILGGKKFTLEGKDYI

SEQ ID NO: 1814 - protein, 15 aa, Blattella germanica
KFTLEGKDYILRVSQ

SEQ ID NO: 1815 - protein, 15 aa, Blattella germanica
GKDYILRVSQLGHTV

SEQ ID NO: 1816 - protein, 15 aa, Blattella germanica
LGHTVCLSGFMGIDL

SEQ ID NO: 1817 - protein, 15 aa, Blattella germanica
CLSGFMGIDLPKGPL

SEQ ID NO: 1818 - protein, 15 aa, Blattella germanica
WILGDVFIGKFYTEF

SEQ ID NO: 1819 - protein, 15 aa, Blattella germanica
VFIGKFYTEFDMENN

SEQ ID NO: 1820 - protein, 15 aa, Blattella germanica
FYTEFDMENNRVGFA

SEQ ID NO: 1821 - protein, 15 aa, Blattella germanica
AGEKVRIIIDRFMDF

SEQ ID NO: 1822 - protein, 15 aa, Blattella germanica
RIIIDRFMDFREQEK

SEQ ID NO: 1823 - protein, 15 aa, Blattella germanica
VPPELVVVFDVRLAV

SEQ ID NO: 1824 - protein, 15 aa, Blattella germanica
VVVFDVRLAVTVDHA

SEQ ID NO: 1825 - protein, 15 aa, Blattella germanica
HDEFLNEDIFLKGID

SEQ ID NO: 1826 - protein, 15 aa, Blattella germanica
NEDIFLKGIDIFCQI

SEQ ID NO: 1827 - protein, 15 aa, Blattella germanica
LKGIDIFCQIIPAVA

SEQ ID NO: 1828 - protein, 15 aa, Blattella germanica
IFCQIIPAVANVAPP

SEQ ID NO: 1829 - protein, 15 aa, Blattella germanica
TLGEAISSSTLRVFA

SEQ ID NO: 1830 - protein, 15 aa, Blattella germanica
NIREGGFAHFEARLE

SEQ ID NO: 1831 - protein, 15 aa, Blattella germanica
SSRITTFFNFGYVAL

SEQ ID NO: 1832 - protein, 15 aa, Blattella germanica
TFFNFGYVALTIKHV

SEQ ID NO: 1833 - protein, 15 aa, Blattella germanica
GYVALTIKHVTTHDI

SEQ ID NO: 1834 - protein, 15 aa, Blattella germanica
TIPYYTKKFDEVVKA

SEQ ID NO: 1835 - protein, 15 aa, Blattella germanica
ISDFRAAIANYHYDA

SEQ ID NO: 1836 - protein, 15 aa, Blattella germanica
YFVAILDYLNHMAKE

SEQ ID NO: 1837 - protein, 15 aa, Blattella germanica
VAISRYLGKQFGLSG

SEQ ID NO: 1838 - protein, 15 aa, Blattella germanica
MIVDTISDFRAAIAN

SEQ ID NO: 1839 - protein, 15 aa, Blattella germanica
DLVANQPNLKALREK

SEQ ID NO: 1840 - protein, 15 aa, Blattella germanica
HDDRLGFLTFCPTNL

SEQ ID NO: 1841 - protein, 15 aa, Blattella germanica
KNRTTIRGRTKFEGN

SEQ ID NO: 1842 - protein, 15 aa, Blattella germanica
DRKMYWQFKMDKIQI

SEQ ID NO: 1843 - protein, 15 aa, Blattella germanica
ALREKVLGLPAIKAW

SEQ ID NO: 1844 - protein, 15 aa, Blattella germanica
IRGRTKFEGNKFTID

SEQ ID NO: 1845 - protein, 15 aa, Blattella germanica
NDIEKRVPFSHDDRL

SEQ ID NO: 1846 - protein, 15 aa, Blattella germanica
HMAKEDLVANQPNLK

SEQ ID NO: 1847 - protein, 15 aa, Blattella germanica
VLEKLEAGFAKLAAS

SEQ ID NO: 1848 - protein, 15 aa, Blattella germanica
NYAIVEGCPAAANGH

SEQ ID NO: 1849 - protein, 15 aa, Blattella germanica
GIRIYVDVVLNQMSG

SEQ ID NO: 1850 - protein, 15 aa, Blattella germanica
RWRQIFNMVGFRNAV

SEQ ID NO: 1851 - protein, 15 aa, Blattella germanica
NIACLLHNKYDSTKS

SEQ ID NO: 1852 - protein, 15 aa, Blattella germanica
NGGYLAAGKLTWADF

SEQ ID NO: 1853 - protein, 15 aa, Blattella germanica
LNIFTNNLGRINTHV

SEQ ID NO: 1854 - protein, 15 aa, Blattella germanica
KTPVLEIDGKQTHQS

SEQ ID NO: 1855 - protein, 15 aa, Blattella germanica
PAYFKMNSPSLWKYN

SEQ ID NO: 1856 - protein, 15 aa, Blattella germanica
PKSMLLNIFTNNLGR

SEQ ID NO: 1857 - protein, 15 aa, Blattella germanica
FQINLDFKNHNGFIR

SEQ ID NO: 1858 - protein, 15 aa, Blattella germanica
SSLFQVANQYTGILY

SEQ ID NO: 1859 - protein, 15 aa, Blattella germanica
VLGLPAIKAWVAKRP

SEQ ID NO: 1860 - protein, 15 aa, Blattella germanica
QVYRRLVTAVNDIEK

SEQ ID NO: 1861 - protein, 15 aa, Blattella germanica
RHNSAYKLHFNAFEY

SEQ ID NO: 1862 - protein, 15 aa, Blattella germanica
KLAASDSKSLLRKYL

SEQ ID NO: 1863 - protein, 15 aa, Blattella germanica
RLFGAEVGWLALHHN

SEQ ID NO: 1864 - protein, 15 aa, Blattella germanica
RVPFSHDDRLGFLTF

SEQ ID NO: 1865 - protein, 15 aa, Blattella germanica
WVCEHRWRQIFNMVG

SEQ ID NO: 1866 - protein, 15 aa, Blattella germanica
ATDYENYAIVEGCPA

SEQ ID NO: 1867 - protein, 15 aa, Blattella germanica
KFTIDYNDKGKAFSA

SEQ ID NO: 1868 - protein, 15 aa, Blattella germanica
AAIANYHYDADENSK

SEQ ID NO: 1869 - protein, 15 aa, Blattella germanica
FGSTLLDVIQSGLEN

SEQ ID NO: 1870 - protein, 15 aa, Blattella germanica
HYQFDSIHKFEFASK

SEQ ID NO: 1871 - protein, 15 aa, Blattella germanica
TKKFDEVVKANGGYL

SEQ ID NO: 1872 - protein, 15 aa, Blattella germanica
YLGKQFGLSGKDDWE

SEQ ID NO: 1873 - protein, 15 aa, Blattella germanica
LNQEAHYQFDSIHKF

SEQ ID NO: 1874 - protein, 15 aa, Blattella germanica
KCHLTNIACLLHNKY

SEQ ID NO: 1875 - protein, 15 aa, Blattella germanica
GVTPVFYNMVKQGLV

SEQ ID NO: 1876 - protein, 15 aa, Blattella germanica
RCGRSMQGYPFNPCL

SEQ ID NO: 1877 - protein, 15 aa, Blattella germanica
STSLVKAHSMRNSAS

SEQ ID NO: 1878 - protein, 15 aa, Blattella germanica
LKYFNMGVQKFWAFD

SEQ ID NO: 1879 - protein, 15 aa, Blattella germanica
GASILTYKTSKLYKM

SEQ ID NO: 1880 - protein, 15 aa, Blattella germanica
NLEIDMIVDTISDFR

SEQ ID NO: 1881 - protein, 15 aa, Blattella germanica
AKGMMHMIKKGANGS

SEQ ID NO: 1882 - protein, 15 aa, Blattella germanica
PAIKAWVAKRPPTDL

SEQ ID NO: 1883 - protein, 15 aa, Blattella germanica
VPIMNIYSAFEFDPN

SEQ ID NO: 1884 - protein, 15 aa, Blattella germanica
KAHSMRNSASMDLSS

SEQ ID NO: 1885 - protein, 15 aa, Blattella germanica
EAGFAKLAASDSKSL

SEQ ID NO: 1886 - protein, 15 aa, Blattella germanica
DVLQWQTIPYTTIHN

SEQ ID NO: 1887 - protein, 15 aa, Blattella germanica
KLYKMAVAFMLAYPY

SEQ ID NO: 1888 - protein, 15 aa, Blattella germanica
AGTWSALNSIQQFIS

SEQ ID NO: 1889 - protein, 15 aa, Blattella germanica
VIYVQIRFSVRRFHP

SEQ ID NO: 1890 - protein, 15 aa, Blattella germanica
RGNNAIKWLVNFGVG

SEQ ID NO: 1891 - protein, 15 aa, Blattella germanica
KFEGNKFTIDYNDKG

SEQ ID NO: 1892 - protein, 15 aa, Blattella germanica
PLKKETIPYYTKKFD

SEQ ID NO: 1893 - protein, 15 aa, Blattella germanica
QKGYMVSSMTDLWEA

SEQ ID NO: 1894 - protein, 15 aa, Blattella germanica
SPYFVTNTEKMITEF

SEQ ID NO: 1895 - protein, 15 aa, Blattella germanica
RILLRLHRCFQVLGR

SEQ ID NO: 1896 - protein, 15 aa, Blattella germanica
RSEERLATATAKLAE

SEQ ID NO: 1897 - protein, 15 aa, Blattella germanica
WCNEEDHLRIISMQM

SEQ ID NO: 1898 - protein, 15 aa, Blattella germanica
RCNNVGIRIYVDVVL

SEQ ID NO: 1899 - protein, 15 aa, Blattella germanica
LDYLNHMAKEDLVAN

SEQ ID NO: 1900 - protein, 15 aa, Blattella germanica
AKRFAKWALPLYNKP

SEQ ID NO: 1901 - protein, 15 aa, Blattella germanica
GEKDFEDYRFQEGDW

SEQ ID NO: 1902 - protein, 15 aa, Blattella germanica
FYTEFDMENNRVGFA

SEQ ID NO: 1903 - protein, 15 aa, Blattella germanica
CPTNLGTTVRASVRI

SEQ ID NO: 1904 - protein, 15 aa, Blattella germanica
FRPWWERYQLVSYNL

SEQ ID NO: 1905 - protein, 15 aa, Blattella germanica
IVINNAGILNDEKWE

SEQ ID NO: 1906 - protein, 15 aa, Blattella germanica
DENSKQKKWDPLKKE

SEQ ID NO: 1907 - protein, 15 aa, Blattella germanica
LIPVDQIIAIATDYL

SEQ ID NO: 1908 - protein, 15 aa, Blattella germanica
GHSHFVSDVVLSSDG

SEQ ID NO: 1909 - protein, 15 aa, Blattella germanica
IHENLIVTSPFRPWW

SEQ ID NO: 1910 - protein, 15 aa, Blattella germanica
KAIFIKCDVTNIPEF

SEQ ID NO: 1911 - protein, 15 aa, Blattella germanica
MAPSYKLTYCPVKAL

SEQ ID NO: 1912 - protein, 15 aa, Blattella germanica
LNAIEFINNIHDLLG

SEQ ID NO: 1913 - protein, 15 aa, Blattella germanica
FLLSYGEKDFEDYRF

SEQ ID NO: 1914 - protein, 15 aa, Blattella germanica
QDVHKKLREWLSKNV

SEQ ID NO: 1915 - protein, 15 aa, Blattella germanica
HGRTFSSLFQVANQY

SEQ ID NO: 1916 - protein, 15 aa, Blattella germanica
WVPSKKCHLTNIACL

SEQ ID NO: 1917 - protein, 15 aa, Blattella germanica
KNMTYVNTSLVLAFS

SEQ ID NO: 1918 - protein, 15 aa, Blattella germanica
KDDWENLEIDMIVDT

SEQ ID NO: 1919 - protein, 15 aa, Blattella germanica
QKKWDPLKKETIPYY

SEQ ID NO: 1920 - protein, 15 aa, Blattella germanica
MNITGSINLMFSQMY

SEQ ID NO: 1921 - protein, 15 aa, Blattella germanica
PVDQIIAIATDYLAN

SEQ ID NO: 1922 - protein, 15 aa, Blattella germanica
QIIAIATDYLANDAE

SEQ ID NO: 1923 - protein, 15 aa, Blattella germanica
MGVQKFWAFDNTTFS

SEQ ID NO: 1924 - protein, 15 aa, Blattella germanica
IQGKFGLDATAVGDE

SEQ ID NO: 1925 - protein, 15 aa, Blattella germanica
QQFISSEMVEPKEAS

SEQ ID NO: 1926 - protein, 15 aa, Blattella germanica
IDDIIAILPVDDLYA

SEQ ID NO: 1927 - protein, 15 aa, Blattella germanica
QPNLKALREKVLGLP

SEQ ID NO: 1928 - protein, 15 aa, Blattella germanica
KVFLKNYLVGNAQFK

SEQ ID NO: 1929 - protein, 15 aa, Blattella germanica
VVRLQSWQSEMLRMN

SEQ ID NO: 1930 - protein, 15 aa, Blattella germanica
HTKLSSSSSITLTLP

SEQ ID NO: 1931 - protein, 15 aa, Blattella germanica
KIGEYKNMIAEGIID

SEQ ID NO: 1932 - protein, 15 aa, Blattella germanica
KALQNAESEVAALNR

SEQ ID NO: 1933 - protein, 15 aa, Blattella germanica
IRFSVRRFHPKLGDK

SEQ ID NO: 1934 - protein, 15 aa, Blattella germanica
KAIEEDLKHFNLKYE

SEQ ID NO: 1935 - protein, 15 aa, Blattella germanica
THQFNVAGSVTVDKT

SEQ ID NO: 1936 - protein, 15 aa, Blattella germanica
IRHAILAAGDLYSRR

SEQ ID NO: 1937 - protein, 15 aa, Blattella germanica
RDMVRRCNNVGIRIY

SEQ ID NO: 1938 - protein, 15 aa, Blattella germanica
KLGDKEMIQHYTLDQ

SEQ ID NO: 1939 - protein, 15 aa, Blattella germanica
NASAVIQEFLKTYKK

SEQ ID NO: 1940 - protein, 15 aa, Blattella germanica
VVFDTGSSNLWVPSK

SEQ ID NO: 1941 - protein, 15 aa, Blattella germanica
EVVKANGGYLAAGKL

SEQ ID NO: 1942 - protein, 15 aa, Blattella germanica
AQIQVVIHLDEQYIY

SEQ ID NO: 1943 - protein, 15 aa, Blattella germanica
ALNSIQQFISSEMVE

SEQ ID NO: 1944 - protein, 15 aa, Blattella germanica
KAAVHLLVAVKASKE

SEQ ID NO: 1945 - protein, 15 aa, Blattella germanica
LVYPTSLGFPLKLVL

SEQ ID NO: 1946 - protein, 15 aa, Blattella germanica
DKKVYRVFESTVTGR

SEQ ID NO: 1947 - protein, 15 aa, Blattella germanica
QTHQSVAISRYLGKQ

SEQ ID NO: 1948 - protein, 15 aa, Blattella germanica
TGILYKARLSLDRNE

SEQ ID NO: 1949 - protein, 15 aa, Blattella germanica
SINLMFSQMYHAQLA

SEQ ID NO: 1950 - protein, 15 aa, Blattella germanica
STSCNVVVASQECVG

SEQ ID NO: 1951 - protein, 15 aa, Blattella germanica
KQLKVSQIMEAARKL

SEQ ID NO: 1952 - protein, 15 aa, Blattella germanica
PNLKPSMPFGKTPVL

SEQ ID NO: 1953 - protein, 15 aa, Blattella germanica
NTTFSNASAVIQEFL

SEQ ID NO: 1954 - protein, 15 aa, Blattella germanica
RIKAFLALVECPCNK

SEQ ID NO: 1955 - protein, 15 aa, Blattella germanica
KKLQFTYSESLDLDD

SEQ ID NO: 1956 - protein, 15 aa, Blattella germanica
VEALFLLMKADPSIH

SEQ ID NO: 1957 - protein, 15 aa, Blattella germanica
SVNATVVRLQSWQSE

SEQ ID NO: 1958 - protein, 15 aa, Blattella germanica
LNTYYSYYYFNYPTF

SEQ ID NO: 1959 - protein, 15 aa, Blattella germanica
VNQHKKAIEEDLKHF

SEQ ID NO: 1960 - protein, 15 aa, Blattella germanica
VFIGKFYTEFDMENN

SEQ ID NO: 1961 - protein, 15 aa, Blattella germanica
LTVFDSTSCNVVVAS

SEQ ID NO: 1962 - protein, 15 aa, Blattella germanica
LVFLRNAKIELKPNQ

SEQ ID NO: 1963 - protein, 15 aa, Blattella germanica
DCGVAGFRVDAAKHM

SEQ ID NO: 1964 - protein, 15 aa, Blattella germanica
SEVTALNRQIGGTPI

SEQ ID NO: 1965 - protein, 15 aa, Blattella germanica
NVIYSQNSFLPRATT

SEQ ID NO: 1966 - protein, 15 aa, Blattella germanica
EIDGKQTHQSVAISR

SEQ ID NO: 1967 - protein, 15 aa, Blattella germanica
YHYDADENSKQKKWD

SEQ ID NO: 1968 - protein, 15 aa, Blattella germanica
KVIDLLLSLYLDQNE

SEQ ID NO: 1969 - protein, 15 aa, Blattella germanica
DRRGEMFYYTRQQLY

SEQ ID NO: 1970 - protein, 15 aa, Blattella germanica
LWEINMIKAIISQLQ

SEQ ID NO: 1971 - protein, 15 aa, Blattella germanica
EMIQHYTLDQVNQHK

SEQ ID NO: 1972 - protein, 15 aa, Blattella germanica
ARYFLERLSNDLPDV

SEQ ID NO: 1973 - protein, 15 aa, Blattella germanica
DVLDIGGLKVQKQTF

SEQ ID NO: 1974 - protein, 15 aa, Blattella germanica
KELVEKYGKGKAIFI

SEQ ID NO: 1975 - protein, 15 aa, Blattella germanica
ERYQLVSYNLNSRSG

SEQ ID NO: 1976 - protein, 15 aa, Blattella germanica
FSQMYHAQLAFSTAF

SEQ ID NO: 1977 - protein, 15 aa, Blattella germanica
VYEVAIPDRLTLRVE

SEQ ID NO: 1978 - protein, 15 aa, Blattella germanica
DPSIHVLKMVAELTH

SEQ ID NO: 1979 - protein, 15 aa, Blattella germanica
GKDYILRVSQLGHTV

SEQ ID NO: 1980 - protein, 15 aa, Blattella germanica
IAGPVSEVTALNRQI

SEQ ID NO: 1981 - protein, 15 aa, Blattella germanica
SHVHFRFVPSAAVEF

SEQ ID NO: 1982 - protein, 15 aa, Blattella germanica
FRKFSNNFEFSYLLG

SEQ ID NO: 1983 - protein, 15 aa, Blattella germanica
GEPIRFLLSYGEKDF

SEQ ID NO: 1984 - protein, 15 aa, Blattella germanica
VQKLQKEVDRLEDEL

SEQ ID NO: 1985 - protein, 15 aa, Blattella germanica
KEFANVVRVVRHTSK

SEQ ID NO: 1986 - protein, 15 aa, Blattella germanica
GQEYTFYVIVTPYAK

SEQ ID NO: 1987 - protein, 15 aa, Blattella germanica
LGHTVCLSGFMGIDL

SEQ ID NO: 1988 - protein, 15 aa, Blattella germanica
CATDTLANEDCFRHE

SEQ ID NO: 1989 - protein, 15 aa, Blattella germanica
AAVAYLQSDEFETIV

SEQ ID NO: 1990 - protein, 15 aa, Blattella germanica
KTPVLSVNATVVRLQ

SEQ ID NO: 1991 - protein, 15 aa, Blattella germanica
QTLFLLLLLLAAVSA

SEQ ID NO: 1992 - protein, 15 aa, Blattella germanica
LKNYQLDSELRIKAF

SEQ ID NO: 1993 - protein, 15 aa, Blattella germanica
LRLSEHLDYVKNLTV

SEQ ID NO: 1994 - protein, 15 aa, Blattella germanica
HHQRLFMVQSLERVV

SEQ ID NO: 1995 - protein, 15 aa, Blattella germanica
LNDYILPAPYEIYPW

SEQ ID NO: 1996 - protein, 15 aa, Blattella germanica
NAIEFLNNIHDLLGI

SEQ ID NO: 1997 - protein, 15 aa, Blattella germanica
AVLALCATDTLANED

SEQ ID NO: 1998 - protein, 1583 aa, Blattella germanica
  misc_feature (1575)..(1578): Xaa can be any naturally occurring amino acid
ALLCCLLVSAASAITPGWLPINSQLDYHVHGRTFSSLFQVANQYTGILYKARLSLDRNEDQLITGKVTEAQFAPVNTQFSSGWDESVPDEKLHWDVVPMSQQPFQIELNSRGEVRKLRVNKFVELWEINMIKAIISQLQVVVDEDKKVYRVFESTVTGRCEALYEVDHLYPTTYLNPWQWTQQHDTKLRIMKNHQFTNCRHNSAYKLHFNAFEYFHLKQHKPETFLSNSAVSRVIADGDNLKNFTFYSGETIHKIVLNPEIYNKQKGMLVSHINVTVERKGRELTVIDYELRNVGDLSYSTSLVKAHSMRNSASMDLSSSSMSSSSSSSSSSSSSSSSSSSSSSSEEHHSHNQKLSKKRQVPLPRPLFEANFDASSGLTTEQPVTFRPRRQLFQGQDMSEEETEQNPEIIPANLLPTYNLIHNTKQVDVDPVGVAVRLSKDIAADLQGEPRVGEDRHILPRFTILVRLLKQLKVSQIMEAARKLYKLENDHPNYMNWDTWRVYRDAVSQAGTWSALNSIQQFISSEMVEPKEASHLITVLPAAVSDKNKAYLHFLFEMTKDPVFKNMTYVNTSLVLAFSEVIHQVEMHQVRDLKIKSVYIPYLVQEFDDAVKENNSIKIQLYTHALGVTGNTHILHYLRPYIIQLKTITHHQRLFMVQSLERVVEHNPRKVIDLLLSLYLDQNEHADIRVEALFLLMKADPSIHVLKMVAELTHTESNNQVLSASQSAIKSAANVEGDIYSEMRRKAKAVEHLLSTRNMDVSYSKSYLYGYKSKKINYDSLYNLNNIGSEDSIYPKSMLLNIFTNNLGRINTHVQKGYMVSSMTDLWEAFHTIYKKDNGSPTDPKTLVKFVEGNLKYFNMGVQKFWAFDNTTFSNASAVIQEFLKTYKKPTNFNHTKLSSSSSITLTLPCAMGLPAYFKMNSPSLWKYNGEFSIQTDAKTDVPMSLENFMNITGSINLMFSQMYHAQLAFSTAFDNKEYISGLDRKVEVHVPVKFQINLDFKNHNGFIRIIPLFTDRDYDVLQWQTIPYTTIHNVPDFETVYMDQLFKLIHVRKTAHFEKKMGENTGIVFKVKYDTDQEFLDTKWFLDEFKVLQLFTGLNYDVPTKDIFYNNLTVYYDHEDTKNHAVSFTVTKEQSKFYETLNPVVQQNLKLSSGKKQKHRNVKSHRIRREYTEDENPAIPKDKQPNSHPRRQEYLSKSMALTGDATAVVLDMTLKFEGPAESYFTTTVSHATSLVNGSSNYLLFYDQHYYEEKKRNQFCLSWSVYKPQVPIMNIYSAFEFDPNSKVHAIMNIGKECENGGSAVANIDMLRLSEHLDYVKNLTVSKLCDHEMRTKRDHVLPACRNSTERASDLNRVHVDINYNLKQHETFKRRVYKVYDFVRTHLYPHVSEDVIVDNPAQFISANFTLKDNTRAFNVSIKTPVLSVNATVVRLQSWQSEMLRMNPRTSFAKRFAKWALPLYNKPTCVVDSSYINTFDNFTYSAHHIVQNDAFYTILDIPQKFNMEYFKVAFKPTSPVPNMQREVLVFLRNAKIELKPNQGMPEVYVEGKRVDYNHHHSTDLNVSQDRIGYVYAFXXXXSSRKP

SEQ ID NO: 1999 - protein, 1250 aa, Blattella germanica
  misc_feature (1223)..(1223): Xaa can be any naturally occurring amino acid
YHCLSSGINAEYAGSSSTPCSNMTWNALLCCLLVSAASAITPGWLPINSQLDYHVHGRTFSSLFQVANQYTGILYKARLSLDRNEDQLITGKVTEAQFSPVNTQFSSGWDESVPDEKLHWDVVPMSQQPFQIELNSRGEVRKLRVNKFVELWEINMIKAIISQLQVVVDEDKKVYRVFESTVTGRCEALYEVDHLYPTTYLNPWQWTQQHDTKLRIMKNHQFTNCRHNSAYKLHFNAFEYFHLKQHKPETFLSNSAVSRVIADGDNLKNFTFYSGETIHKIVLNPEIYNKQKGMLVSHINVTVERKGRELTVIDYELRNVGDLSYSTSLVKAHSMRNSASMDLSSSSMSSSSSSSSSSSSSSSSSSSSSEEHHSHNQKLSKKRQVPLPRPLFEANFDASSGLTTEQPVTFRPRRQLFQGQDMSEEETEQNPEIIPANLLPTYNLIHNTKQVDVDPVGVAVRLSKDIAADLQGEPRVGEDRHILPRFTILVRLLKQLKVSQIMEAARKLYKLENDHPNYMNWDTWRVYRDAVSQAGTWSALNSIQQFISSEMVEPKEASHLITVLPAAVSDKNKAYLHFLFEMTKDPVFKNMTYVNTSLVLAFSEVIHQVEMHQVRDLKIKSVYIPYLVQEFDDAVKENNSIKIQLYTHALGVTGNTHILHYLRPYIIQLKTITHHQRLFMVQSLERVVEHNPRKVIDLLLSLYLDQNEHADIRVEALFLLMKADPSIHVLKMVAELTHTESNNQVLSASQSAIKSAANVEGDIYSEMRRKAKAVEHLLSTRNMDVSYSKSYLYGYKSKKINYDSLYNLNYIGSEDSIYPKSMLLNIFTNNLGRINTHVQKGYMVSSMTDLWEAFHTIYKKDNGSPTDPKTLVKFVEGNLKYFNMGVQKFWAFDNTTFSNASAVIQEFLKTYKKPTNFNHTKLSSSSSITLTLPCAMGLPAYFKMNSPSLWKYNGEFSIQTDAKTDVPMSLENFMNITGSINLMFSQMYHAQLAFSTAFDNKEYISGLDRKVEVHVPVKFQINLDFKNHNGFIRIIPLFTDRDYDVLQWQTIPYTTIHNVPDFETVYMDQLFKLIHVRKTAHFEKKMGENTGIVFKVKYDTDQEFLDTKWFLDEFKVLQLFTGLNYDVPTKDIFYNNLTVYYDHEDTKNHAVSFTVTKEQSKFYETLNPVVQQNLKLSSGKKQKHRNVKSHRIRREYTEDENPAIPKDKQPNSHPRRQEYLSKXMALTGDATAVVLDMTLKFEGPAESYFT

SEQ ID NO: 2000 - protein, 804 aa, Blattella germanica
TAHFEKKMGENTGIVFKVKYDTDQEFLDTKWFLDEFKVLQLFTGLNYDVPTKDIFYNNLTVYYDHEDTKNHAVSFTVTKEQSKFYETLNPVVQQNLKLSSGKKQKHRNVKSHRIRREYTEDENPAIPKDKQPNSHPRRQEYLSKSMALTGDATAVVLDMTLKFEGPAESYFTTTVSHATSLVNGSSNYLLFYDQHYYEEKKRNQFCLSWSVYKPQVPIMNIYSAFEFDPNSKVHAIMNIGKECENGGSAVANIDMLRLSEHLDYVKNLTVSKLCDHEMRTKRDHVLPACRNSTERASDLNRVHVDINYNLKQHETFKRRVYKVYDFVRTHLYPHVSEDVIVDNPAQFISANFTLKDNTRAFNVSIETPVLSVNATSVRLQSWQSEMLRMNPRTSFAKRFAKWALPLYYKPTCVVDSSYINTFDNFTYSAHHIVQNDAFYTILDIPQKFNMEYFKVAFKPTSPVPNMQREVLVFLRNAKIELKPNQGMPEVYVEGKRVDYNHHHSTDLNVSQDRIGYVYALPTKAAHIVFPSYEIEMFYDGSRIMIQASNMYRNFTKGLCGNMDGEFVNDVLTPWGCYAKDMALFVASYADNSNSEVRKIKATQNEQTCVPQFHQPLVSHQMRLSQVIKLADTSSSSESSSSSESHENNSSPSSESQVNKSKRQPNSRPRSSSSSSSSSSSESNESVLAKKIINNQIGPKPTLIPSQSPMTSDDKCMTQQPRHTYYENQFCVSEKPLDTCMPLICHATESYTIDVNFYCVPLGPAANHYMKLVKKGILPDLSRNRNGKRVVLPVEIPIQCEPVLN

SEQ ID NO: 2001 - protein, 709 aa, Blattella germanica
ESNNQVLSASQSAIKSAANVEGDIYSEMRRKAKAVEHLLSTRNMDVSYSKSYLYGYKSKKINYDSLYNLNYIGSEDSIYPKSMLLNIFTNNLGRINTHVQKGYMVSSMTDLWEAFHTIYKKDNGSPTDPKTLVKFVEGNLKYFNMGVQKFWAFDNTTFSNASAVIQEFLKTYKKPTNFNHTKLSSSSSITLTLPCAMGLPAYFKMNSPSLWKYNGEFSIQTDAKTDVPMSLENFMNITGSINLMFSQMYHAQLAFSTAFDNKEYISGLDRKVEVHVPVKFQINLDFKNHNGFIRIIPLFTDRDYDVLQWQTIPYTTIHNVPDFETVYMDQLFKLIHVRKTAHFEKKMGENTGIVFKVKYDTDQEFLDTKWFLDEFKVLQLFTGLNYDVPTKDIFYNNLTVYYDHEDTKNHAVSFTVTKEQSKFYETLNPVVQQNLKLSSGKKQKHRNVKSHRIRREYTEDENPAIPKDKQPNSHPRRQEYLSKSMALTGDATAVVLDMTLKFEGPAESYFTTTVSHATSLVNGSSNYLLFYDQHYYEEKKRNQFCLSWSVYKPQVPIMNIYSAFEFDPNSKVHAIMNIGKECENGGSAVANIDMLRLSEHLDYVKNLTVSKLCDHEMRTKRDHVLPACRNSTERASDLNRVHVDINYNLKQHETFKRRVYKVYDFVRTHLYPHVSEDVIVDNPAQFISANFTLKDNTRAFNVSIKTTCT

SEQ ID NO: 2002 - protein, 384 aa, Blattella germanica
YKLENDHPNYMNWDTWRVYRDAVSQAGTWSALNSIQQFISSEMVEPKEASHLITVLPAAVSDKNKAYLHFLFEMTKDPVFKNMTYVNTSLVLAFSEVIHQVEMHQVRDLKIKSVYIPYLVQEFDDAVKENNSIKIQLYTHALGVTGNTHILHYLRPYIIQLKTITHHQRLFMVQSLERVVEHNPRKVIDLLLSLYLDQNEHADIRVEALFLLMKADPSIHVLKMVAELTHTESNNQVLSASQSAIKSAANVEGDIYSEMRRKAKAVEHLLSTRNMDVSYSKSYLYGYKSKKINYDSLYNLNYIGSEDSIYPKSMLLNIFTNNLGRINTHVQKGYMVSSMTDLWEAFHTIYKKDNGSPTDPKTLVKFVEGNLKYFNIGCPEILGI

SEQ ID NO: 2003 - protein, 364 aa, Blattella germanica
EQKINYDSLYNLNYIGSEDSIYPKSMLLNIFTNNLGRINTHVQKGYMVSSMTDLWEAFHTIYKKDNGSPTDPKTLVKFVEGNLKYFNMGVQKFWAFDNTTFSNASAVIQEFLKTYKKPTNFNHTKLSSSSSITLTLPCAMGLPAYFKMNSPSLWKYNGEFSIQTDAKTDVPMSLENFMNITGSINLMFSQMYHAQLAFSTAFDNKEYISGLDRKVEVHVPVKFQINLDFKNHNGFIRIIPLFTDRDYDVLQWQTIPYTTIHNVPDFETVYMDQLFKLIHVRKTAHFEKKMGENTGIVFKVKYDTDQEFLDTKWFLDEFKVLQLFTGLNYDVPTKDIFYNNLTVYYDHEDTKNHSRIFYCDKRTI

SEQ ID NO: 2004 - protein, 315 aa, Blattella germanica
MTWNALLCCLLVSAASAITPGWLPINSQLDYHVHGRTFSSLFQVANQYTGILYKARLSLDRNEDQLITGKVTEAQFSPVNTQFSSGWDESVPDEKLHWDVVPMSQQPFQIELNSRGEVRKLRVNKFVELWEINMIKAIISQLQVVVDEDKKVYRVFESTVTGRCEALYEVDHLYPTTYLNPWQWTQQHDTKLRIMKNHQFTNCRHNSAYKLHFNAFEYFHLKQHKPETFLSNSAVSRVIADGDNLKNFTFYSGETIHKIVLNPEIYNKQKGMLVSHINVTVERKGRELTVIDYELRNVGDLSYSTSLVKDTFDEK

SEQ ID NO: 2005 - protein, 281 aa, Blattella germanica
NLQKPTNFNHTKLSSSSSITLTLPCAMGLPAYFKMNSPSLWKYNGEFSIQTDAKTDVPMSLENFMNITGSINLMFSQMYHAQLAFSTAFDNKEYISGLDRKVEVHVPVKFQINLDFKNHNGFIRIIPLFTDRDYDVLQWQTIPYTTIHNVPDFETVYMDQLFKLIHVRKTAHFEKKMGENTGIVFKVKYDTDQEFLDTKWFLDEFKVLQLFTGLNYDVPTKDIFYNNLTVYYDHEDTKNHAVSFTVTKEQSKFYETLNPVVQQNLKLSSGKKQKHRNVKSH

SEQ ID NO: 2006 - protein, 259 aa, Blattella germanica
LYIMIMKTPKTIAVSFTVTKEQSKFYETLNPVVQQNLKLSSGKKQKHRNVKSHRIRREYTEDENPAIPKDKQPNSHPRRQEYLSKSMALTGDATAVVLDMTLKFEGPAESYFTTTVSHATSLVNGSSNYLLFYDQHYYEEKKRNQFCLSWSVYKPQVPIMNIYSAFEFDPNSKVHAIMNIGKECENGGSAVANIDMLRLSEHLDYVKNLTVSKLCDHEMRTKRDHVLPACRNSTERASDLNRVHVDINYNLKQHETFKR

SEQ ID NO: 2007 - protein, 255 aa, Blattella germanica
  misc_feature (168)..(168): Xaa can be any naturally occurring amino acid
QHETFKRRVYKVYDFVRTHLYPHVSEDVIVDNPAQFISANFTLKDNTRAFNVSIKTPVLSVNATVVRLQSWQSEMLRMNPRTSFAKRFAKWALPLYNKPTCVVDSSYINTFDNFTYSAHHIVQNDAFYTILDIPQKFNMEYFKVAFKPTSPVPNMQREVLVFLRNAKXELKPNQGMPEVYVEGKRVDYNHHHSTDLNVSQDRIGYVYALPTKAAHIVFPSYEIEMFYDGSRIMIQASNMYRNFTKGLCGKISVHI

SEQ ID NO: 2008 - protein, 224 aa, Blattella germanica
TSLGSINLMFSQMYHAQLAFSTAFDNKEYISGLDRKVEVHVPVKFQINLDFKNHNGFIRIIPLFTDRDYDVCNGRLFHTQPSITYQTLKQSTWINYFKLIHVRKTAHFEKKMGENTGIVFKVKYDTDQEFLDTKWFLDEFKVLQLFTGLNYDVPTKDIFYNNLTVYYDHEDTKNHAVSFTVTKEQSKFYETLNPVVQQNLKLSSGKKQKHRNVKSHRIRREYTE

SEQ ID NO: 2009 - protein, 200 aa, Blattella germanica
SSSTPCSNMTWNALLCCLLVSAASAITPGWLPINSQLDYHVHGRTFSSLFQVANQYTGILYKARLSLDRNEDQLITGKVTEAQFSPVNTQFSSGWDESVPDEKLHWDVVPMSQQPFQIELNSRGEVRKLRVNKFVELWEINMIKAIISQLQVVVDEDKKVYRVFESTVTGRCEALYEVDHLYPTTYLNPWQWTQQHDTKL

SEQ ID NO: 2010 - protein, 149 aa, Blattella germanica
YHVHGRTFSSLFQVANQYTGILYKARLSLDRNEDQLITGKVTEAQFSPVNTQFSSGWDESVPDEKLHWDVVPMSQQPFQIELNSRGEVRKLRVNKFVELWEINMIKAIISQLQVVVDEDKKVYRVFESTVTGRCEALYEVDHLYPNNIY

SEQ ID NO: 2011 - protein, 124 aa, Blattella germanica
WQWTQQHDTKLRIMKNHQFTNCRHNSAYKLHFNAFEYFHLKQHKPETFLSNSAVSRVIADGDNLKNFTFYSGETIHKIVLNPEIYNKQKGMLVSHINVTVERKGRELTVIDYELRNVGRSLLLN

SEQ ID NO: 2012 - protein, 118 aa, Blattella germanica
RHNSAYKLHFNAFEYFHLKQHKPETFLSNSAVSRVIADGDNLKNFTFYSGETIHKIVLNPEIYNKQKGMLVSHINVTVERKGRELTVIDYELRNVGDLSYSTSLVKAHSMRNSASIGS

SEQ ID NO: 2013 - protein, 113 aa, Blattella germanica
FNMEYFKVAFKPTSPVPNMQREVLVFLRNAKIELKPNQGMPEVYVEGKRVDYNHHHSTDLNVSQDRIGYVYALPTKAAHIVFPSYEIEMFYDGSRIMIQASNMYRNFTKGLLW

SEQ ID NO: 2014 - protein, 731 aa, Blattella germanica
  misc_feature (4)..(4): Xaa can be any naturally occurring amino acid
TALXLILATAALAVAYPSPGQDYKVLADKTYLTRQRDLLKLLVRIQQPNYYADQYEIGQSYDIEANINNYKYPYVVKNFVAAYKNGMLARGVPYSPYYTTQSYETKLLFDLFYYANDYDTFYKTACWARDHINEGQFLYALSSALFQREDLNDYILPAPYEIYPWLFVDSDVIQRAYETRMSDVHLTAPKTYIFPVNYTVHTPEQELNYFYHDVGLNTYYSYYYFNYPTFFNSTEYGVQFDRRGEMFYYTRQQLYARYFLERLSNDLPDVEPLHYDRPFQTEYNPQLRYPNGEDMPVRPYEYSRRSLYYSNGYSHYYGNYYGGNNEYYTGNYYTGDYHPSYYYGYATQYDYYYPEDLQSYERRVRDAIDYGYFFGFQGEKYPLYENYIKGIDYLGDVIEGNGDMVNQRFYGSIYHYYRQLAGKSVDPYNNYGLAPSALQNIYTTLRDPANWQILKRVNYLFQRYKGYLPRYTYDELSFPGIRIDNVDVGKLVTYFEHFDVDLDNVVNVKVAEDGKYIDYRARQTRLNHKPFTYNIEVHSEQATDAYVRVFLGPKYDYLHSEYDLNDRRHYFVEIDRFPYKVQAGKTTITRNSRDSSVVSPDYQSYRTLMRKVYDAYEGKDQFYYDKSEQYCGYPERLLLPKGKLGGQEYTFYVIVTPYAKQDDHDFEPYNYKSFSYCGVGANHRIPDDKPLGYPFDRPVYSHDFVTPNMYFKDVVIYHKKYEEINAATTHQ

SEQ ID NO: 2015 - protein, 382 aa, Blattella germanica
  misc_feature (204)..(204): Xaa can be any naturally occurring amino acid
YYGGNNNYYNGNYYTGDYKPTYYYGYANQYDYYYPEDLQTYERRVRDAIDYGYFFGFPGGKYPLYDDYIKGIDYLGDAIEGNGDTVNKRLYGSIYHYYRQLAGKNVDPYNDIGLAPSALQNIYTTLRDPANWQILKRVNYLFQRYKGYLPRYTYDELSFPGVRVDNVDVGKLVTYFDYFDIDLDNVVNVKVAEDGKYVDYRARXTRLNHKPFTYNVEVYSEQATDVYVRVFLGPKYDYLHREYDLNDRRHYFVEIDRFPYKVQSGKTTITRNSRDSSVVSPDYQSYRTLMRKVYDAYEGKDKFYYDRSENYCGYPERLLLPKGKLGGQEYTFYVIVTPYVKQDDHDFEPYNYKSFSYCGVGANHRIPDDKPLGYPFDRPVYR

SEQ ID NO: 2016 - protein, 83 aa, Blattella germanica
  misc_feature (81)..(81): Xaa can be any naturally occurring amino acid
YEYDVPRHGEQFYYFYQQIYARYMLERYSNDMPDIKPFTYNKAFKTPYNPQLRYPNGQEVPARPAYMVPQDFDLYMCLTSXNY

SEQ ID NO: 2017 - protein, 264 aa, Blattella germanica
FSNMDIKGKNALVTGAATGIGLEYVKQLLENGAQHVAVCDLDVRKGENAVKELVEKYGKGKAIFIKCDVTNIPEFEDAFKKAYNAFKSLDIVINNAGILNDEKWELQIAINVNGVVRGTLLGLEYMGKDKGGKGGVIVNIASILGLQNMAGCPVYVGTKHAVVGISRSFGMPFHFDRTGVRVLTMCPGVTDTPLISEAHHRQPGEWGEECGRELDSLPKQPPENVAKGMMHMIKKGANGSVWVCEGNKPVYEVAIPDRLTLRVE

SEQ ID NO: 2018 - protein, 1585 aa, Blattella germanica
CLSSGINAEYAGVLWVCATGMARQVTSKGQQTLFLLLLLLAAVSASQQCKPKCEGKSSAFQTHYEAGNTYVYSFEGGTTTSLPGQQGDGVKLHLKAKAEVSFGDACEAVLKLKDVQVTGPDAQKFTHLNDLESHPVSFSFENGVVGGHICANGHDSEASLNLKRAILAHFQVAPQETARSGKSVVLDVFGLCPTDYSYTERGGTTTITKSRNLNKCHLREHLRQDFASVTYHVESDLQNSPLMESTQEFKHQLQGGVLRVSESHEKYLYRPFANQDAGAKTVVDSKLTYVGHNKKTAPAVSGAEQQSIIFHPPNVHPGSGSAASVVDALHKAHQAMPEYVGENAAKEFANVVRVVRHTSKNDLLSVYNQVKSGAGFKDKSAGTKMFLDALFRAGTGDAVEVAVELLKSNKITGPHAEFYYLQLAYTRHVTKAALLAAVTLLEQPNPSKLAYLGVGALAGRYCSEHRCDGVAEVDEFLEKLSLLLNGGCKVSNYDEEVKIVATLKALQNAHHLNDAVTSKLQTCLLDDGVPTRIRSAVLDVFQSDACKAKDISLEVLKNYQLDSELRIKAFLALVECPCNKKANDLKELLDKEPSYQVGSFIVSYLRNLRASANPSKEKQKAVFGEIRTTKRFPIDFRKFSNNFEFSYLLGGANVGTTVESNVIYSQNSFLPRATTLNLTTEFFGHSVNLLEVELRQENLDLLAEGLFGPKGYFNTHTAAEVVQKGKEHWTDVENTAKQRFNHAIRGKRSVTKEQLELVKSKSVSPYHSETDRELLLELSTRLFGAEVGWLALHHNARDAAKNAFDTTFNLLDKVMKKAKDFDYKLRQHNTFLDTELVYPTSLGFPLKLVLAGSSAVHVELEGKVDVHDLVHNLKNSHVHFRFVPSAAVEFVGAFVVDAYAVEAGLKVAATLHTATGSDITVKATEDVGVDVTVGLPVQKQDIVTLKTEVLTTVQEKGKPEVNTEISLPGTPRRDYHGCFDQLSPLVGLTFCTTMSFPWDPVASKAAFYPLNGPSKFSLVVENEDVTSYHFRASLNKADPHKKSLELLLETPGSKTERKLGLILERTYDPYHGVKAQLNSPWKQVSAELAFTDNDKELSLLAKVTNDEQEYYVKLGASVTGDPNHATYHPLLEYKTPERKSSLVSKKGAKGAPEKLTHQFNVAGSVTVDKTANSKKYTFNDVVFTTPQGQYKVDGTVTSEGPTAFSTDLKVYYGENHVVLKSGFKRPSANNFNVHANVQPSQYPDFGVNLIWNHKRDKNNFGNSLAVVHGRDPNSEEARFTLNQEAHYQFDSIHKFEFASKNKVTYPLLGIIGKLDASVQPKTFHLDVEASYEKHKFEAELNANHGQQHTGDYDVKFHAKVLDNSLEFETKRVIVSEGKSKFTTELQVHPGGKYEAVADVTHVFERNNIDFQIDAEAKIHGQPDPYKLDSGLVYNPQLFDAHHKINVGAENYVDVSVNFKRGSGGNPSGNAKVFLKNYLVGNAQFKYTNGEGSATLNVDVPKLGRKLKGTGDLHVKGSQHVATVELYYNAEKKLAFHTDTDLKKDSLDSKNVLSILNYKTEVNVKGTLQGKLEDGQLKGEFGCNSA

SEQ ID NO: 2019 - protein, 718 aa, Blattella germanica
PKGKVSRTLKFHDHHYTGPFSVDNVLEFKLPSDKVKHIKMESHLQGELAEKKLQFTYSESLDLDDKTYKLSLESNNELEKGSNKLILVLPNKEPATYVNSWYFNYDDYRSKDVLKGGLTLTRNENAKFSIDVSGKKDYSDLDVHAKLDTPYEKLKHAELSLKNKYVPAPRLEVDTDFSLTVDDKKLAVVNKLTPGPFAGFPNIDFTATHPEGKTRVYVHLTSHKKNEVSGKAELEWPTNGGGKLTSSGKASYESFQNFRVEADIESAKLNLKKWHVLLANKPQAKGSSSKTLQIQATEAGQPVINGRLEFHVEDKENTYKAGVSGNVQVRSQSQPLKADVFFNKFNPTDNGELGAEVGITIHLGDKSFDALSKHTNKESRASVSVCYQAGQCSVAEAHSVVKVLDFNHLEHDFGAKFDFKACGVNEGFVLTGKNVRQPLSFDHAVELKLLNEKHTTYNFHSYLNEKALGVILTLPQRIIALEGKLGYDKEKGERKVDLGFWLDKKKQPDNKAAVHLLVAVKASKEGTTFHGDAKFSHPALNKEFSVTGKGIALQDDTLLDASVDLDIFAKKNQKITLVAKLERIPISHGYNVTGHLSAKGKLIDVSLDGGAALSADGASYISTLAYQDEKHKSKSAQIQVVIHLDEQYIYVKSPTAELIKIERHESNNGKNAKGEVFVLGLEPVEFDETEDFPVSSKAVYYKKILPTRSSPLISCTIC

SEQ ID NO: 2020 - protein, 468 aa, Blattella germanica
AGQTREHKEALTRENKKLGDDLHDARNQLADLNRRFHELEIELRRLENEREELTAAYKEAEAGRKAEEQRAQRLSAELGNFRHEAERRLAEKDEEIESIRKQTAIEIEQLNARVVEAETKLKTEVTRIKKKLQIQITELEMSLDVANKNNIELQKTIKKQSLTLTEIQAHYDEVQRQLQVTLDQYGIAQRKLQSVTAELEEIRGNYEGALRAKRTAEQQYEETISRVNELTTINVNLASAKSKVEQELSTLAGDYDEVTRELRAADERYQRVQVELKHTVEILHEEQERIVKIEAIKKSLEIEVKNLSVRLEEVEANAIVGGKRIISKLEARVRDLELELDEEKRRHAETIKILRKKERQVKEVMIQSEEDQKNVSLLQENLDKLVQRVNIYKRQLQEQEGMSQQSVTRVRRFQRELEAAEDRADTAESNLSLIRAKHRTFVTTSTVPGSQVYLVQETHRTTTTSEGI

SEQ ID NO: 2021 - protein, 343 aa, Blattella germanica
VHQVRLREYIDGPTPEPLSNYLDAQYYGPISLGTPPQKFKVVFDTGSSNLWVPSKKCHLTNIACLLHNKYDSTKSSTYEQNGTSFAIQYGSGSLSGFLSTDVLDIGGLKVQKQTFAEAMSEPGLAFVAAKFDGILGMAYSTISVDGVTPVFYNMVKQGLVSQPIFSFYLSRDPGAAEGGELILGGSDPNHYKGDFTYLSVDRKMYWQFKMDKIQIGNGSFCADGCEAIADTGTSLIAGPVSEVTALNRQIGGTPIVGGEYMVDCNLIPKLPEIDFILGGKKFTLEGKDYILRVSQLGHTVCLSGFMGIDLPKGPLWILGDVFIGKFYTEFDMENNRVGFAEAV

SEQ ID NO: 2022 - protein, 207 aa, Blattella germanica
HEGTPGHGSLLLEDTAGEKVRIIIDRFMDFREQEKKKLQSNPNLTVGDVTTVNLTQLKGGVQSNVVPPELVVVFDVRLAVTVDHAEFEAMVKKWCAEAGPGTYVEYEQKEPKVQVTKLDNSNPWWLAFKSACDDMNLELKPAIFPGGTDSRYVRGVGLPALGFSPMNKTPVLLHDHDEFLNEDIFLKGIDIFCQIIPAVANVAPPKK

SEQ ID NO: 2023 - protein, 203 aa, Blattella germanica
ALSPTTLGEAISSSTLRVFARTSVTGDLGIPEQQRYIEKVEELEAYQQQQQYKYVQELPESTSPPEFKTPIKDQPNIREGGFAHFEARLEPIGDSTLQVEWLKDGRPVEASSRITTFFNFGYVALTIKHVTTHDIGVYTCRAFNRLGQATTSAQLTVVSKKDIILESQHPGGLEKIQYLEDSSRYDRSTREETTVTQKPRFMG

SEQ ID NO: 2024 - protein, 197 aa, Blattella germanica
LFSTNILCDEIKNDEGVLVFTKENFKKGVSDNEFVLVEFYAPWCGHCKSLAPEYIKAAKKLADQESTIKLAKVDATEETELAEEHGVRGYPTLKFFRSGSPIDYSGGRTSDEIVSWLLKKTGPVAKDIASVDDAKSFIDASNVAIIGFFKDSSSEAAKNFLAAANAIDDYPFGITADDAVFGEYSVDGEKVILLQEV

SEQ ID NO: 2025 - protein, 193 aa, Blattella germanica
TREGERPMTKDNHLLGKFDLTGIPPAPRGVPQIEVTFEIDANGILQVSAEDKGTGNREKIVITNDQNRLTPDDIERMIKDAEKFADDDKKLKERVEARNELESYAYSLKNQLADKEKLGAKVSDSDKTKMEEAIDEKIKWLEENQDVDTEEYKTQKKELEDIVQPIIAKLYQGAGGAPPPSNSDDDDELKDEL

SEQ ID NO: 2026 - protein, 187 aa, Blattella germanica
QITVTTDDIGQDVSGLELGALLTAMAMVTAKLATVETSCNAQAQEDNHQRPWLNSPSMATKDRTSMTSVSSTDSTLVYKIQPVNNAHGGGDRRCGVAGCSKDLNPGCPNELRVNNGCKSSCYAFNTDQYCCRGQYGTVETCDTSRWPVNSASYFKSNCPDAYSYAYDDRTSTFTCDDRAYRTHHLLD

SEQ ID NO: 2027 - protein, 143 aa, Blattella germanica
SSLEVFFQQQRILLRLHRCFQVLGRWGGDVAFVKHLTALENTDGHNTAAWASGLKSEDYELLCPDGGRAPVTEYLRCHLAQVPPHMVVTSNDKTENQLNEIRHAILAAGDLYSRRPDLFKLFGDFDGTKDLLFKNSATGLLSV

SEQ ID NO: 2028 - protein, 140 aa, Blattella germanica
  misc_feature (15)..(15): Xaa can be any naturally occurring amino acid
RHQATQSTQQKKWYXKHCLQMASNTMPYQIASGFSTSQLAMIQNAIDEYHAKTCVTLRPYNSATDRDYVYIKGDESGCWSYVGRIGGRQELNLGTGCFSLGTVEHELLHAWGFYHQQSATERDDYVTIHWENIQSGTENN

SEQ ID NO: 2029 - protein, 133 aa, Blattella germanica
YGKIIKRLEAKGFKLVAMKFVWADEELLKKHYADLSSRPFFPGLVKYMSSGPVVPMVWEGLNVVKTGRLMLGATDPKDSNPGTIRGDLCIQVGRNIIHGSDSVESANKEINLWFDSKELIAWKPAVEAWVYED

SEQ ID NO: 2030 - protein, 130 aa, Blattella germanica
  misc_feature (25)..(25): Xaa can be any naturally occurring amino acid
STRMELQHLQSIEVFPEDEGQYVCXAVNSIGTAKTTCKLKVKPMQDAGRKAKSGDKAPVIVDHLKSDFVKDGEPVILSCRIIGAQKFDVVWLHNNKEIKPSKDFQYTNEANIYKLNIAEIFPEDSGTYTC

SEQ ID NO: 2031 - protein, 15 aa, Blattella germanica
DCGVAGFRVDAAKHM

SEQ ID NO: 2032 - protein, 15 aa, Blattella germanica
LDYERFRGSWIIAAG

SEQ ID NO: 2033 - protein, 15 aa, Blattella germanica
KNRTTIRGRTKFEGN

SEQ ID NO: 2034 - protein, 15 aa, Blattella germanica
IRGRTKFEGNKFTID

SEQ ID NO: 2035 - protein, 15 aa, Blattella germanica
KFEGNKFTIDYNDKG

SEQ ID NO: 2036 - protein, 15 aa, Blattella germanica
ATDYENYAIVEGCPA

SEQ ID NO: 2037 - protein, 15 aa, Blattella germanica
NYAIVEGCPAAANGH

SEQ ID NO: 2038 - protein, 15 aa, Blattella germanica
VIYVQIRFSVRRFHP

SEQ ID NO: 2039 - protein, 15 aa, Blattella germanica
IRFSVRRFHPKLGDK

SEQ ID NO: 2040 - protein, 15 aa, Blattella germanica
KLGDKEMIQHYTLDQ

SEQ ID NO: 2041 - protein, 15 aa, Blattella germanica
KAIEEDLKHFNLKYE

SEQ ID NO: 2042 - protein, 15 aa, Blattella germanica
KTPVLEIDGKQTHQS

SEQ ID NO: 2043 - protein, 15 aa, Blattella germanica
DENSKQKKWDPLKKE

SEQ ID NO: 2044 - protein, 15 aa, Blattella germanica
QKKWDPLKKETIPYY

SEQ ID NO: 2045 - protein, 15 aa, Blattella germanica
PLKKETIPYYTKKFD

SEQ ID NO: 2046 - protein, 15 aa, Blattella germanica
TIPYYTKKFDEVVKA

SEQ ID NO: 2047 - protein, 15 aa, Blattella germanica
TKKFDEVVKANGGYL

SEQ ID NO: 2048 - protein, 15 aa, Blattella germanica
YFVAILDYLNHMAKE

SEQ ID NO: 2049 - protein, 15 aa, Blattella germanica
QPNLKALREKVLGLP

SEQ ID NO: 2050 - protein, 15 aa, Blattella germanica
ALREKVLGLPAIKAW

SEQ ID NO: 2051 - protein, 15 aa, Blattella germanica
VLGLPAIKAWVAKRP

SEQ ID NO: 2052 - protein, 15 aa, Blattella germanica
VLEKLEAGFAKLAAS

SEQ ID NO: 2053 - protein, 15 aa, Blattella germanica
FGSTLLDVIQSGLEN

SEQ ID NO: 2054 - protein, 15 aa, Blattella germanica
NDIEKRVPFSHDDRL

SEQ ID NO: 2055 - protein, 15 aa, Blattella germanica
ALNSIQQFISSEMVE

SEQ ID NO: 2056 - protein, 15 aa, Blattella germanica
VEALFLLMKADPSIH

SEQ ID NO: 2057 - protein, 15 aa, Blattella germanica
DPSIHVLKMVAELTH

SEQ ID NO: 2058 - protein, 15 aa, Blattella germanica
PKSMLLNIFTNNLGR

SEQ ID NO: 2059 - protein, 15 aa, Blattella germanica
LNIFTNNLGRINTHV

SEQ ID NO: 2060 - protein, 15 aa, Blattella germanica
KTLVKFVEGNLKYFN

SEQ ID NO: 2061 - protein, 15 aa, Blattella germanica
LKYFNMGVQKFWAFD

SEQ ID NO: 2062 - protein, 15 aa, Blattella germanica
MGVQKFWAFDNTTFS

SEQ ID NO: 2063 - protein, 15 aa, Blattella germanica
NASAVIQEFLKTYKK

SEQ ID NO: 2064 - protein, 15 aa, Blattella germanica
HTKLSSSSSITLTLP

SEQ ID NO: 2065 - protein, 15 aa, Blattella germanica
SVNATVVRLQSWQSE

SEQ ID NO: 2066 - protein, 15 aa, Blattella germanica
VVRLQSWQSEMLRMN

SEQ ID NO: 2067 - protein, 15 aa, Blattella germanica
PRHGEQFYYFYQQIY

SEQ ID NO: 2068 - protein, 15 aa, Blattella germanica
DYQSYRTLMRKVYDA

SEQ ID NO: 2069 - protein, 15 aa, Blattella germanica
GQEYTFYVIVTPYAK

SEQ ID NO: 2070 - protein, 15 aa, Blattella germanica
KAIFIKCDVTNIPEF

SEQ ID NO: 2071 - protein, 15 aa, Blattella germanica
IVINNAGILNDEKWE

SEQ ID NO: 2072 - protein, 15 aa, Blattella germanica
KEFANVVRVVRHTSK

SEQ ID NO: 2073 - protein, 15 aa, Blattella germanica
RIKAFLALVECPCNK

SEQ ID NO: 2074 - protein, 15 aa, Blattella germanica
FRKFSNNFEFSYLLG

SEQ ID NO: 2075 - protein, 15 aa, Blattella germanica
NVIYSQNSFLPRATT

SEQ ID NO: 2076 - protein, 15 aa, Blattella germanica
RLFGAEVGWLALHHN

SEQ ID NO: 2077 - protein, 15 aa, Blattella germanica
LVYPTSLGFPLKLVL

SEQ ID NO: 2078 - protein, 15 aa, Blattella germanica
SHVHFRFVPSAAVEF

SEQ ID NO: 2079 - protein, 15 aa, Blattella germanica
KKLQFTYSESLDLDD

SEQ ID NO: 2080 - protein, 15 aa, Blattella germanica
AQIQVVIHLDEQYIY

SEQ ID NO: 2081 - protein, 15 aa, Blattella germanica
GVTPVFYNMVKQGLV

SEQ ID NO: 2082 - protein, 15 aa, Blattella germanica
SEVTALNRQIGGTPI

SEQ ID NO: 2083 - protein, 15 aa, Blattella germanica
GKDYILRVSQLGHTV

SEQ ID NO: 2084 - protein, 15 aa, Blattella germanica
NAIEFLNNIHDLLGI

SEQ ID NO: 2085 - protein, 15 aa, Blattella germanica
IDDIIAILPVDDLYA

SEQ ID NO: 2086 - protein, 15 aa, Blattella germanica
LIPVDQIIAIATDYL

SEQ ID NO: 2087 - protein, 15 aa, Blattella germanica
QIIAIATDYLANDAE

SEQ ID NO: 2088 - protein, 15 aa, Blattella germanica
ATDYLANDAEVQAAV

SEQ ID NO: 2089 - protein, 15 aa, Blattella germanica
EYQNLIQKLKDKGVD

SEQ ID NO: 2090 - protein, 15 aa, Blattella germanica
IQKLKDKGVDVDHII

SEQ ID NO: 2091 - protein, 15 aa, Blattella germanica
DKGVDVDHIIELIHQ

SEQ ID NO: 2092 - protein, 15 aa, Blattella germanica
DTRGLPEDLQDFLAL

SEQ ID NO: 2093 - protein, 15 aa, Blattella germanica
LIPTDQVLAIAADYL

SEQ ID NO: 2094 - protein, 15 aa, Blattella germanica
QVLAIAADYLANDAE

SEQ ID NO: 2095 - protein, 15 aa, Blattella germanica
LKALFNEKLETSPDF

SEQ ID NO: 2096 - protein, 15 aa, Blattella germanica
EYLKSDEFETIVVTV

SEQ ID NO: 2097 - protein, 15 aa, Blattella germanica
DEFETIVVTVDSLPE

SEQ ID NO: 2098 - protein, 15 aa, Blattella germanica
IVVTVDSLPEFKNFL

SEQ ID NO: 2099 - protein, 15 aa, Blattella germanica
DDLQDFLALIPVDQI

SEQ ID NO: 2100 - protein, 15 aa, Blattella germanica
PVDQIIAIATDYLAN

SEQ ID NO: 2101 - protein, 15 aa, Blattella germanica
IAIATDYLANDAEVQ

SEQ ID NO: 2102 - protein, 15 aa, Blattella germanica
DYLANDAEVQAAVAY

SEQ ID NO: 2103 - protein, 15 aa, Blattella germanica
DAEVQAAVAYLQSDE

SEQ ID NO: 2104 - protein, 15 aa, Blattella germanica
AAVAYLQSDEFETIV

SEQ ID NO: 2105 - protein, 15 aa, Blattella germanica
VTLDALPELQNFLNF

SEQ ID NO: 2106 - protein, 15 aa, Blattella germanica
LPELQNFLNFLEANG

SEQ ID NO: 2107 - protein, 15 aa, Blattella germanica
HDLLGIPHIPVSGRK

SEQ ID NO: 2108 - protein, 15 aa, Blattella germanica
IPHIPVSGRKYHIRR

SEQ ID NO: 2109 - protein, 15 aa, Blattella germanica
VSGRKYHIRRGVGIT

SEQ ID NO: 2110 - protein, 15 aa, Blattella germanica
PIDQILAIAADYLAN

SEQ ID NO: 2111 - protein, 15 aa, Blattella germanica
DYLANDAEVQAAVEY

SEQ ID NO: 2112 - protein, 15 aa, Blattella germanica
VTVDSLPEFKNFLNF

SEQ ID NO: 2113 - protein, 15 aa, Blattella germanica
LQTNGLNAIEFINNI

SEQ ID NO: 2114 - protein, 15 aa, Blattella germanica
LNAIEFINNIHDLLG

SEQ ID NO: 2115 - protein, 15 aa, Blattella germanica
ATGRKHVRRGVGING

SEQ ID NO: 2116 - protein, 15 aa, Blattella germanica
HVRRGVGINGLIDDV

SEQ ID NO: 2117 - protein, 15 aa, Blattella germanica
VGINGLIDDVIAILP

SEQ ID NO: 2118 - protein, 15 aa, Blattella germanica
IAILPVDELYALFQE

SEQ ID NO: 2119 - protein, 15 aa, Blattella germanica
KLESSPEFKALYDAI

SEQ ID NO: 2120 - protein, 15 aa, Blattella germanica
PEFKALYDAIRSPEF

SEQ ID NO: 2121 - protein, 15 aa, Blattella germanica
LYDAIRSPEFQSIVQ

SEQ ID NO: 2122 - protein, 15 aa, Blattella germanica
RSPEFQSIVQTLKAM

SEQ ID NO: 2123 - protein, 15 aa, Blattella germanica
QSIVQTLKAMPEYQD

SEQ ID NO: 2124 - protein, 15 aa, Blattella germanica
TLKAMPEYQDLIQRL

SEQ ID NO: 2125 - protein, 15 aa, Blattella germanica
IHENLIVTSPFRPWW

SEQ ID NO: 2126 - protein, 15 aa, Blattella germanica
FRPWWERYQLVSYNL

SEQ ID NO: 2127 - protein, 15 aa, Blattella germanica
ERYQLVSYNLNSRSG

SEQ ID NO: 2128 - protein, 15 aa, Blattella germanica
RCNNVGIRIYVDVVL

SEQ ID NO: 2129 - protein, 15 aa, Blattella germanica
GIRIYVDVVLNQMSG

SEQ ID NO: 2130 - protein, 15 aa, Blattella germanica
RGNNAIKWLVNFGVG

SEQ ID NO: 2131 - protein, 15 aa, Blattella germanica
GASILTYKTSKLYKM

SEQ ID NO: 2132 - protein, 15 aa, Blattella germanica
KLYKMAVAFMLAYPY

SEQ ID NO: 2133 - protein, 15 aa, Blattella germanica
WVCEHRWRQIFNMVG

SEQ ID NO: 2134 - protein, 15 aa, Blattella germanica
RWRQIFNMVGFRNAV

SEQ ID NO: 2135 - protein, 15 aa, Blattella germanica
LTVFDSTSCNVVVAS

SEQ ID NO: 2136 - protein, 15 aa, Blattella germanica
STSCNVVVASQECVG

SEQ ID NO: 2137 - protein, 15 aa, Blattella germanica
GRGIEDSLTISNLTT

SEQ ID NO: 2138 - protein, 15 aa, Blattella germanica
SQQDIVLADELSQEV

SEQ ID NO: 2139 - protein, 15 aa, Blattella germanica
AVLALCATDTLANED

SEQ ID NO: 2140 - protein, 15 aa, Blattella germanica
CATDTLANEDCFRHE

SEQ ID NO: 2141 - protein, 15 aa, Blattella germanica
LANEDCFRHESLVPN

SEQ ID NO: 2142 - protein, 15 aa, Blattella germanica
PYSVLATDYENYAIV

SEQ ID NO: 2143 - protein, 15 aa, Blattella germanica
VNQHKKAIEEDLKHF

SEQ ID NO: 2144 - protein, 15 aa, Blattella germanica
KHFNLKYEDLHSTCH

SEQ ID NO: 2145 - protein, 15 aa, Blattella germanica
MAPSYKLTYCPVKAL

SEQ ID NO: 2146 - protein, 15 aa, Blattella germanica
KLTYCPVKALGEPIR

SEQ ID NO: 2147 - protein, 15 aa, Blattella germanica
FLLSYGEKDFEDYRF

SEQ ID NO: 2148 - protein, 15 aa, Blattella germanica
GEKDFEDYRFQEGDW

SEQ ID NO: 2149 - protein, 15 aa, Blattella germanica
PNLKPSMPFGKTPVL

SEQ ID NO: 2150 - protein, 15 aa, Blattella germanica
QTHQSVAISRYLGKQ

SEQ ID NO: 2151 - protein, 15 aa, Blattella germanica
VAISRYLGKQFGLSG

SEQ ID NO: 2152 - protein, 15 aa, Blattella germanica
YLGKQFGLSGKDDWE

SEQ ID NO: 2153 - protein, 15 aa, Blattella germanica
KDDWENLEIDMIVDT

SEQ ID NO: 2154 - protein, 15 aa, Blattella germanica
NLEIDMIVDTISDFR

SEQ ID NO: 2155 - protein, 15 aa, Blattella germanica
MIVDTISDFRAAIAN

SEQ ID NO: 2156 - protein, 15 aa, Blattella germanica
ISDFRAAIANYHYDA

SEQ ID NO: 2157 - protein, 15 aa, Blattella germanica
AAIANYHYDADENSK

SEQ ID NO: 2158 - protein, 15 aa, Blattella germanica
YHYDADENSKQKKWD

SEQ ID NO: 2159 - protein, 15 aa, Blattella germanica
EVVKANGGYLAAGKL

SEQ ID NO: 2160 - protein, 15 aa, Blattella germanica
NGGYLAAGKLTWADF

SEQ ID NO: 2161 - protein, 15 aa, Blattella germanica
AAGKLTWADFYFVAI

SEQ ID NO: 2162 - protein, 15 aa, Blattella germanica
HMAKEDLVANQPNLK

SEQ ID NO: 2163 - protein, 15 aa, Blattella germanica
DLVANQPNLKALREK

SEQ ID NO: 2164 - protein, 15 aa, Blattella germanica
AAKFIIEEDSEAMEK

SEQ ID NO: 2165 - protein, 15 aa, Blattella germanica
IEEDSEAMEKELREA

SEQ ID NO: 2166 - protein, 15 aa, Blattella germanica
EAMEKELREAFRLYD

SEQ ID NO: 2167 - protein, 15 aa, Blattella germanica
ELREAFRLYDKEGNG

SEQ ID NO: 2168 - protein, 15 aa, Blattella germanica
FRLYDKEGNGYIPTS

SEQ ID NO: 2169 - protein, 15 aa, Blattella germanica
KEGNGYIPTSCLREI

SEQ ID NO: 2170 - protein, 15 aa, Blattella germanica
YIPTSCLREILRELD

SEQ ID NO: 2171 - protein, 15 aa, Blattella germanica
DELDMMIEEIDADGS

SEQ ID NO: 2172 - protein, 15 aa, Blattella germanica
KALQNAESEVAALNR

SEQ ID NO: 2173 - protein, 15 aa, Blattella germanica
RSEERLATATAKLAE

SEQ ID NO: 2174 - protein, 15 aa, Blattella germanica
VQKLQKEVDRLEDEL

SEQ ID NO: 2175 - protein, 15 aa, Blattella germanica
KEVDRLEDELVHEKE

SEQ ID NO: 2176 - protein, 15 aa, Blattella germanica
EAGFAKLAASDSKSL

SEQ ID NO: 2177 - protein, 15 aa, Blattella germanica
KLAASDSKSLLRKYL

SEQ ID NO: 2178 - protein, 15 aa, Blattella germanica
RCGRSMQGYPFNPCL

SEQ ID NO: 2179 - protein, 15 aa, Blattella germanica
LIDDHFLFKEGDRFL

SEQ ID NO: 2180 - protein, 15 aa, Blattella germanica
FLFKEGDRFLQHANA

SEQ ID NO: 2181 - protein, 15 aa, Blattella germanica
WCNEEDHLRIISMQM

SEQ ID NO: 2182 - protein, 15 aa, Blattella germanica
QVYRRLVTAVNDIEK

SEQ ID NO: 2183 - protein, 15 aa, Blattella germanica
RVPFSHDDRLGFLTF

SEQ ID NO: 2184 - protein, 15 aa, Blattella germanica
HDDRLGFLTFCPTNL

SEQ ID NO: 2185 - protein, 15 aa, Blattella germanica
CPTNLGTTVRASVRI

SEQ ID NO: 2186 - protein, 15 aa, Blattella germanica
SPYFVTNTEKMITEF

SEQ ID NO: 2187 - protein, 15 aa, Blattella germanica
KIGEYKNMIAEGIID

SEQ ID NO: 2188 - protein, 15 aa, Blattella germanica
RHNSAYKLHFNAFEY

SEQ ID NO: 2189 - protein, 15 aa, Blattella germanica
STSLVKAHSMRNSAS

SEQ ID NO: 2190 - protein, 15 aa, Blattella germanica
AVRLSKDIAADLQGE

SEQ ID NO: 2191 - protein, 15 aa, Blattella germanica
LVRLLKQLKVSQIME

SEQ ID NO: 2192 - protein, 15 aa, Blattella germanica
KQLKVSQIMEAARKL

SEQ ID NO: 2193 - protein, 15 aa, Blattella germanica
QQFISSEMVEPKEAS

SEQ ID NO: 2194 - protein, 15 aa, Blattella germanica
KNMTYVNTSLVLAFS

SEQ ID NO: 2195 - protein, 15 aa, Blattella germanica
QKGYMVSSMTDLWEA

SEQ ID NO: 2196 - protein, 15 aa, Blattella germanica
NTTFSNASAVIQEFL

SEQ ID NO: 2197 - protein, 15 aa, Blattella germanica
PAYFKMNSPSLWKYN

SEQ ID NO: 2198 - protein, 15 aa, Blattella germanica
MNITGSINLMFSQMY

SEQ ID NO: 2199 - protein, 15 aa, Blattella germanica
SINLMFSQMYHAQLA

SEQ ID NO: 2200 - protein, 15 aa, Blattella germanica
FSQMYHAQLAFSTAF

SEQ ID NO: 2201 - protein, 15 aa, Blattella germanica
FQINLDFKNHNGFIR

SEQ ID NO: 2202 - protein, 15 aa, Blattella germanica
DVLQWQTIPYTTIHN

SEQ ID NO: 2203 - protein, 15 aa, Blattella germanica
VPIMNIYSAFEFDPN

SEQ ID NO: 2204 - protein, 15 aa, Blattella germanica
LRLSEHLDYVKNLTV

SEQ ID NO: 2205 - protein, 15 aa, Blattella germanica
AKRFAKWALPLYNKP

SEQ ID NO: 2206 - protein, 15 aa, Blattella germanica
HIVFPSYEIEMFYDG

SEQ ID NO: 2207 - protein, 15 aa, Blattella germanica
SYEIEMFYDGSRIMI

SEQ ID NO: 2208 - protein, 15 aa, Blattella germanica
RILLRLHRCFQVLGR

SEQ ID NO: 2209 - protein, 15 aa, Blattella germanica
IRHAILAAGDLYSRR

SEQ ID NO: 2210 - protein, 15 aa, Blattella germanica
QSYETKLLFDLFYYA

SEQ ID NO: 2211 - protein, 15 aa, Blattella germanica
KLLFDLFYYANDYDT

SEQ ID NO: 2212 - protein, 15 aa, Blattella germanica
HINEGQFLYALSSAL

SEQ ID NO: 2213 - protein, 15 aa, Blattella germanica
QFLYALSSALFQRED

SEQ ID NO: 2214 - protein, 15 aa, Blattella germanica
LNDYILPAPYEIYPW

SEQ ID NO: 2215 - protein, 15 aa, Blattella germanica
EIYPWLFVDSDVIQR

SEQ ID NO: 2216 - protein, 15 aa, Blattella germanica
LNTYYSYYYFNYPTF

SEQ ID NO: 2217 - protein, 15 aa, Blattella germanica
SYYYFNYPTFFNSTE

SEQ ID NO: 2218 - protein, 15 aa, Blattella germanica
DRRGEMFYYTRQQLY

SEQ ID NO: 2219 - protein, 15 aa, Blattella germanica
MFYYTRQQLYARYFL

SEQ ID NO: 2220 - protein, 15 aa, Blattella germanica
RQQLYARYFLERLSN

SEQ ID NO: 2221 - protein, 15 aa, Blattella germanica
ARYFLERLSNDLPDV

SEQ ID NO: 2222 - protein, 15 aa, Blattella germanica
QATDAYVRVFLGPKY

SEQ ID NO: 2223 - protein, 15 aa, Blattella germanica
KELVEKYGKGKAIFI

SEQ ID NO: 2224 - protein, 15 aa, Blattella germanica
EDAFKKAYNAFKSLD

SEQ ID NO: 2225 - protein, 15 aa, Blattella germanica
AKGMMHMIKKGANGS

SEQ ID NO: 2226 - protein, 15 aa, Blattella germanica
VYEVAIPDRLTLRVE

SEQ ID NO: 2227 - protein, 15 aa, Blattella germanica
QTLFLLLLLLAAVSA

SEQ ID NO: 2228 - protein, 15 aa, Blattella germanica
SLLLNGGCKVSNYDE

SEQ ID NO: 2229 - protein, 15 aa, Blattella germanica
EVKIVATLKALQNAH

SEQ ID NO: 2230 - protein, 15 aa, Blattella germanica
ISLEVLKNYQLDSEL

SEQ ID NO: 2231 - protein, 15 aa, Blattella germanica
LKNYQLDSELRIKAF

SEQ ID NO: 2232 - protein, 15 aa, Blattella germanica
QVGSFIVSYLRNLRA

SEQ ID NO: 2233 - protein, 15 aa, Blattella germanica
THQFNVAGSVTVDKT

SEQ ID NO: 2234 - protein, 15 aa, Blattella germanica
LNQEAHYQFDSIHKF

SEQ ID NO: 2235 - protein, 15 aa, Blattella germanica
HYQFDSIHKFEFASK

SEQ ID NO: 2236 - protein, 15 aa, Blattella germanica
KAAVHLLVAVKASKE

SEQ ID NO: 2237 - protein, 15 aa, Blattella germanica
WVPSKKCHLTNIACL

SEQ ID NO: 2238 - protein, 15 aa, Blattella germanica
KCHLTNIACLLHNKY

SEQ ID NO: 2239 - protein, 15 aa, Blattella germanica
DVLDIGGLKVQKQTF

SEQ ID NO: 2240 - protein, 15 aa, Blattella germanica
DRKMYWQFKMDKIQI

SEQ ID NO: 2241 - protein, 15 aa, Blattella germanica
GHSHFVSDVVLSSDG

SEQ ID NO: 2242 - protein, 15 aa, Blattella germanica
HGRTFSSLFQVANQY

SEQ ID NO: 2243 - protein, 15 aa, Blattella germanica
LLMKADPSIHVLKMV

SEQ ID NO: 2244 - protein, 15 aa, Blattella germanica
QVLSASQSAIKSAAN

SEQ ID NO: 2245 - protein, 15 aa, Blattella germanica
SKVHAIMNIGKECEN

SEQ ID NO: 2246 - protein, 15 aa, Blattella germanica
FKRRVYKVYDFVRTH

SEQ ID NO: 2247 - protein, 15 aa, Blattella germanica
EYFKVAFKPTSPVPN

SEQ ID NO: 2248 - protein, 15 aa, Blattella germanica
TFEIDANGILQVSAE

SEQ ID NO: 2249 - protein, 15 aa, Blattella germanica
NNFEFSYLLGGANVG

SEQ ID NO: 2250 - protein, 15 aa, Blattella germanica
KLDSGLVYNPQLFDA

SEQ ID NO: 2251 - protein, 15 aa, Blattella germanica
DLHVKGSQHVATVEL

SEQ ID NO: 2252 - protein, 15 aa, Blattella germanica
LDSKNVLSILNYKTE

SEQ ID NO: 2253 - protein, 15 aa, Blattella germanica
VLSILNYKTEVNVKG

SEQ ID NO: 2254 - protein, 15 aa, Blattella germanica
QTLFAGYFDNTIRVW

SEQ ID NO: 2255 - protein, 15 aa, Blattella germanica
VVFQQTKAIADKIKD

SEQ ID NO: 2256 - protein, 15 aa, Blattella germanica
WSKVVIAYEPVWAIG

SEQ ID NO: 2257 - protein, 15 aa, Blattella germanica
YWTIDFDIAVARVST
